United States Patent Application Publication US 2025/0051766 A1 - sequence listing, part 25

SEQ ID NO: 5065 - DNA, 58617616 bp, Homo sapiens (residues 49,933,530-52,104,552 of 58,617,616)
  source 1..58617616: mol_type = genomic DNA
ctcttgaatttcaaacctggtttcttacaggtggttgtctggggtgggtggagtggcgacaggatagagctgaaggactatgcaaatgaggaagtaagtcagggcgggctttgagaaggggacccatatcctacaggcaaaaagcaggctaggtgaccttgggacactacgctaagggagggaggctaaaggcggccaggtttgcagtgcgggaagatgagcaggccagtgggaggaggggcagggcagggctgtagttggtgactgggtgttcattttagctctaagaaaaaaaatcagtgtttcgtgaaggtgttggagaggggctgtgtctgggtgagggatggcggggtactgatttttttgggaggttatgagcaaaaataaaacgaaacatttcctctggcttgtgcatcttgtctttgagagaagcagctggggagaggcggccttgtaatctcagcactttgagaggctgaggcgggcagatcacctgaggtcaggagttcaggaccagcctgaccaacaaggtgaaaccccatctctactgaaaatacaaaattagctgggtgtggtggcgtgtgcctgtaatcccggcaacttgggaggctgaggcaggagactcgcttgagccaaggagacggaggttgcagtgagccaagattgttctattgcactccagtctgggaaacaagattgaaacgctatctcaaaaaaaaaaaaaaaaaaaaagggggggggaggtggggagggccgggcgtggtgactcacgcctgtaatcccagcactttgggaggctgaggtgggcagatcacgaggtcaggagattgagaccatcctggctaacacggtgaaaccctgtctttactaaaaatatgaaaaattagccgggtgtggtggcgggcgcctgtggtcccagctactcgggaggctgaggcaggagaatcacttcaacctaggaggcagagcttgcagtgagcctagattgcgccactgcactccagcctgggcgacagagcaatactccatctcaaaaaaaaaagaaaaagacagtaataaagataacagggtgggtgcagtggctcacgcctgcaatcccagcactttgggaggctttgccaggtgaattgcttgagcccagaaggtggaaatcagcctggataacataatgagacctcatctctacaaaaaataatttttaagaaaatggctgggtgctgtggcttacgcttgtaatcccagcactttgggaggccaaggtgggtggatcacctgaggtcaggagttcgagaccagcctgactaacatggtgaaaccctgtttctactaaaaatacaaaattagccaggcatggtggtgggcgcctgtaatcccagctacttgggaggctcaggcaggagaatcccctaaacctgggaggcggaggttgcagtgagctgagatcgcaccattgcattccagcctcagcaacaagagtggaactccatctcaaaaaaaaaaaaagaaaaaaaattagtgggtgaggtggtgtgcacctgtagtcctacatacttgggaggctgaggcaggaggatcgcttgaggccagaagttggggaccagccttggcaacatagcaagatgctgtctctacaaaaaaaaaattaggtggggccgggcgccttggctcaacgtctgtaatcccagcactttgggaggccgaggcgggcgaatcatttgaggtcaggagttcaagaccagcctggccagcatggtgaaacctcatctactaaaaatacaaaaaaaattagccaggcatggtggcgcatgcctgtagtcccagctacctgggaggctgaggcaggagaatggcttgaacccaggaggcagaggttgcagtgagctgagatcacaccattacactccagcctgggcaacagagcaaggctctgtctcaaaaaaaaaaaaaaaagaaaagaaaaagaaaagaaagaaaattagctgggcgtggtggcatgaacctgtagtctgtagttccaggtactcaggaggctgaggcggggggattgcttgaacccaaaggttgaggctgcagtgagccatgtttgtgccattgcactccagcctgggtgacaaagcaagaacctgttaaaaaaaaaaaaaaaaagactgggcacagtggctcatgcctgtaatcccagcactttgggaggctgaggtgggtggatcacgaggtcaagcaatggagaccatcctggccaacatggtgaaaccccgtctctatgaaaaatacaaaaattagctgggcatggtggtgcacacttgtggtcccagctactcaggaggctgaggcaggagaattgcttgaactcaggaggcagaggttgcattgagccgagatcgtgccactgcactccagcctgggcaacagagcaagactgtctcaaaaaataataataaataaatacataaataaaagaaaaaagaaaaaaaaagttctccacccagcagcaaagcatctttctttgcaacagtgcggaattttaccggagccttgcgtgtgtggacaacagcgacagtgaagaaatccccccacttttccggcccaggtgtagtggctgacccctgtaatccctacactttgggaggccaaagtgggaggatcgtttgagcccaggagcttgagaacaacctgggcaacatagcacgaccctgtctctacaaaaagttaaaaaaaactaacaacaaaaaagaaatcctcccgcttttttgcattccaggagatggcttactgagaagaaccacccttccgtatatgacttagataagacttgaggatgaaccccttgtctaagacaagggcagacatagaccctccaaattcccatttcgttgtctcgtacatgattaactgaactgttttgtccccagtgatcaattgaaacaaaatgcttgtttaacctaacttactctcctcactgccaggcctctgaatttcagtccatccacagcctcagccagaatacagcccctccttaagcacctctcctgagaagaataaaacattccctggtcgattgtcctgtacaatagcccttgcatcttattttcccacagctggttctttctaaccttgtttactcctccccataaaagaaaaagtctttggctgtgcacatggcctgcgcctgtggtgccagcactttgggaggctgaggaggatcccttgagttctggaattccagagcagcctgggcaacatagcaagaccccatctctacaaaaaaattacaaattagccgtgcatgatggcacgacagtgagctgagattgcaccactgcactgcagcctggcgacagagtgagattctgtctcaaaaaaaaaaaaaaaggaaaaaaacctgcccaattcttgtctcacttgcaaatcttttgcttctccctattgcaatgtcctcacctttatagcaatagtccctttcccaccttaaaaaaatcctttcaaataaagtttctttcctcaaggctgcagtgagccatgattgcgtctgggtgacatagccagactgagtctctaaataaagtctcctcaccaagtatgatttttttaattgaggtgaaattcatataatagaaaaccattttacagggaacatttcatagaacagtggcatttagtacattcgcggttctgtgcaactactgcctctctttcctaatcacttctatcactccaaaagaaaacctcatccccgttaagcagttacttcccacttctgccttctgatgtgttttgtatttgtattcattgaatgcttgcaattccatgaagtggggaaatgagtataagtctgtttttttttttttcagacagagtcttactctgtggcccaggctggagtgtagtggcgcgatcttggctcactgcaacctctgtctcccgagttcaagcgattctccggcctcagcctcctgagtagctgggaccacaggtgcacaccaccaagtccagataatttttgtatttttagtagagacggggtttcaccatgttggccaggctggtctcgactcctgacctcacgtgatccgcccacctcagccttccaaactgctgggactataggtgtgacccaccgcgccgggcgcgaaatgatttcttactgtgagtcatggtcagaaaagtttgaaagccactggtaggctccccccagcttgacatactgattttcagacaatagccggtttgcagaccccacgcttccaaaaccaatcatttctggcctctgggcggagtttgtcttagcaggagtctgccgccaggtggcgcgcgtaccccgccgggagtgggttttgctccatcccagactcagaccgtccaagccggtgatttccttctggtcggtttacggggactagaagccctgacttcgaatacagttcacaaagcagacccctgcagggggttttaggcggctaagaagggaattggctctcctaagactctctttctccagagagctcattaaatgcctcccgcgccagaaggggtccccgcccccggagctcgcatcccagtggggaggacacacacaaaccccattcgcgatcccgtcagtgcagggaggctccggcctggggccgaagagccgagtctctctggtgcctgacagcacgggatagagccccgcccggccacctgctggctgtgtgaccttgggaatagtgcttggcctcgctgtgccttggttccctccactataaaatggcagtgataacagcagccacttcatagggttccgggcattgcgtaagttaatacatgcaaagcgctcagaagggatggtgcatgtttgtcgaacccgttgttaaaaattcccattttaggctgggcgcagtcactcacacctgtaatcccagcacttcgggaggccgaggcgggcggatcacctaaggtcaggagttcgagaccagcctggccaacatggtgaaaccccgtctctactaaaaatacaaaaattagccaggcgtggtggcatgcgcctgtaatcccagctattcaggaggctgaggcaggagaatcgcttgaacccgggaggcggaggttgcagtgagatgagatcacaccactgcactccagcctgggtgacagagtgagaccctgtctcaaaaaaaatttcttattttacagaagagaaaaccaaggacaagaacagggtagtgaatcaccaagcccacattttttttttttttttctgcaggaagatctccaagttgagtccagtggtctgactcccagcccagatggccttccctcggccttgtgcttgcttgcttggggtggaagtggagccagctcccttgggatagctgctcaagccccgagtgaaatcctcccgcagaggacattggccccctgttggcatcagtgctgggactcgaatgaaactctgtttctgcctgggtcaggagaatagctagattaaataaataagtcactgtaatgtcacagggtgaacccccaaattgggattcagcctgggaggccacatgagttgttggcttcgtgcagaaaagaattcaagagtgagccagcagagtaaagtgaaagcaagtgaaggaggccgggcgcggtggctcacgcctgtaatcccagcactttgggaggccaaggtgggaggatcacttgagtccaggatttcgagaccatcttgggcaacatggcgaaaccctgtctctacaaacaatacaaaaattagctgggtgtggtggtgtatgcctgtaatcccagctacttgggaggctgaagtaggagaatcacttgaacccagggggcagaggttgcagtgaaccaagattgtgccattgcatgctagcctgggtgacagagcaagactctgtcttaacaaaaataaaaaataaaaaaaaaattaaggctgggcgcagtggctcacgcctgtaatcccagcactttgggaggctgaggtgggcggatcacgaggtcaggagattgagaccatccttgctaacatggtgaaactgtgtctctactaaaattaaaaaaaaaaaaaagttagctgggtgtgggggcaggcgcctgtactcctagctactcgagaggcggaggcaggagaatggtgtgaacctgggaggcggagcttgcagtgggccgagattgcaccactgcactccagcctgggccagagtgagactctgtctcaaaaaaaaaaaaaaaaaaatataggctaaaataaacaaaggactgccaccacggccacggccactaccgacacctcaccaggggccaaagcatgtatttcccagagcctgagagctgcatgcctggggctgctgccattgacagcagtcctgcccctgcaccagcagcagtgccatgcacatttgtacatgccctgaggacaggatctccttgccgacaactgccactaccactaacacccaagcatgccacatagcagccaagggattgcctcagcctgttcaccacctgcacccacgtgcaccaccacagggcctgaggacgggcccacccagtcaggcactgctccccacaatgcccaagcatgctgcctagggccctggcattgccctgcccatctgccaccactggtatctatatactcctcctgggggtctgaggatgggtctacccagcctgctgccaccatcaccactggcacacactgacatgcatcacccacctagcccatctcagccactggtaacaccagtgtttgctgcctgggaagttaaggattgtcccaccattgccactgccaccatcatgccatgcatgcagcccagggacccaaggacccactcatcatccttgctgactgctgcccctgctggcaccaaagtgagccacgtggaggttcatgaattggcccatctggacctgttaacaccagtacttgtgtatacccccaaaggccaaaggataggtatgctcagcctgcctctgtcaccactggaggccaaggattgacccacctggcatcccatccccagcaaagtctcaatacagcctccagtgacaaccacatcctaagccactgaggaagtcagacactactaatgctgtttgtagctgaaaaaatcatagagactacatgactgcacgctagaatcaaagctgaagagcattacccagtgaacaccacagatacgatgtcttcatgaaaaagtcttccgttatgaaagccaatccaaaaaatgggaagaagtgactgttacaccagacgcgcaaaaatcaatgtagggacataagagacttgaaaaagcaagaaaatatgaaacctccaaaggagtgtgataatgctcacacaacaaattccaatgaaaagaaatttataaagtgccagtgtgggcggcaagccacccaggtgccgaggcaagagaccgagggcacgagctgttccagtatagtaaaatatataaaacaacaagagttatactagatctagatcacagacatgattacatatgaatatcattaatcattagtttgtagcaattactccttattccaatattataataatcctcgctctacaatcataacctaggaaaaaccaggccatacagagataggagctgaggggacatagtgtgaagtgaccagaagacaagagtgcgagccttctgttatgcccggacagggccattagaggcctccttggtctagcggtaacgccagcgtctgggaacacgcctgttgctaagcggacagtggtctagtggtagcctcagtgtcaaggaaaaccacccgctacttagcggaccaggaaagggagtctctctttccccgggggagtttagagaagactctactcctccacctcttgtggagggcctgacatcagtcaggctcgcctgcagttatccggaggcctaaccatctccctgtgatgctgtgcttcagctcctagtccaccttcatgttccatcctgtacacctggctctgccttctagatagcaatagcaaaattagtgaaagtactaaaagtctgatatgcagaaataatggcataagctgtctctctctctttctcctctctctctctgccttggctgccaggcagggaagggccccctgtccagtggacacgtgacccatgtgaccttacctatcactggagatgactcacactctttaccctgccccttttgctttgtatccaataaataacagcacagccagacattcggggccactacgggtctccacgtcttggtggtagtggtcccccgggcccagctgtcttttttttaatctttgtcttgtgtctttatttctacaatctcttgtctccgcacacggggagaaaaacccactgaccctgtggggctagtccctacagccagaaaaaggattcaaaatattgctattaaagaatttcagtgaggtctgggcatggtggctcatgcctgtaatcccagcactttgggaggccgaggcgggtggatcatctaaagtcaggagttcaacaccagcctggttaacatagcgaaaccctgtctctactaaaaatacaaaacttagccgggcatagtggtgggcgccagtaatcccagctacttaggaagctgaggcaggggaatcacttgaacccaggaggcggaggttgcagtaagccgagattgtgccactgctctccagcctgagtaacagagtgagactctgtctcaaaaaacaaacaaacagcctgggcgtggcgactcatgcctgtaatcccagcactttgggaggccgaggtgggcggatcacgaggtcaggaggtcgagaccatcctggctaaaaatacaaaaaaattagctgggcgtgctggcgggcacctgtagtcccagctactcaggaggctgaggcaggagaatggcatgaacccgggaggcggagcttgcagtgagccaagatcgtgccactgcactccagcctgggtgatggagcaagactgtctcaaaaaacaaaacaaaacaaaaaaaaacccaaaaccgaaaaactttcaagtctctaggcatagaaggaacatatctcaacacaataaaggccatctatgacaaactcacaacgaacgttatactgaatggggaaaagctgaaaaccttttctcaaagaactagaataagacaaggaagtctacctctaccactcctattaaacatagtaccagaagccctagccagaacaatcagacaagataatgaaacaaaaggtatccaaattggaaaacaggaagtcaaatagtccttatttgcagattgcatgatcttatacttagaaaaacttcatcagaaaacttttaggtctgataaaccaattgtggcaggatacaaaatcaacatacaaaaatcagtagcaaacctatacaccaataatgaactggctgaaaaagaaatcaagaaagcaatcccatttacaatagctacaaaaaaaaaaaaaagaaaaagaagaagaaacttaggaataaatttaactaaggaaatgaaagactttgacaagaaaaactacaaaacactgatgaaagaagctgaagatgcaaacgaatggaaaggcatcttgtactcatggattggaagaatattgttaagataacattactacccagagcaacctatggattgaatgcaatccctagcaagaaaccaatgacaatttaggaaaagcaatcctaaaattcgtatggaaccaaaaaagcttgaataaccagagcaatcctgggcaaaaagaacaaagctggaggcaccacactacttgacttcagaatgtattataaagctataataaccacaacagcatggtgttgctataaaaacagacacatagaccaggggaacagaacagagaacccagaaataaacccacatatttacagccaactgattttcaacgaaggtgccaagaacttacattgggaaaaagacatcctcttcaatagatggtgctgagaaaactgggtatccatatgcagaagaatgaaattagacccccatctctcaccatatacaaaaaccgactcaaaatggaatagaaacttaagcgtgagacctgaaagtataaaactactaaaatgaaacataggaaaaattatccaagacattggtctaggcaaagattttatggttaagacttcaaaagaacaggcaacaaaaacaaaaatagacagatgggactacattaaaccaaaagcttcttcgcagaaaaggaaacagccaatggaatgaacagacagtatgttgaatgggagacaatacttgcaaattattcatctgaccaaggactaatatccagaatatacaaggaatgcaaacaactcaacagcaaaagaacaaccacattaaaaagcaggcaaaggacatgaatagatatttctaaaaataaaacataatggtcgggcatggtggttcatgcctgtaatcccagcactttgggaggccgaggcaggcggatcacctgaggtcaggagttcgagaccagcctggccaacatggtgaaaccctgtctctactaaaaatatatattaaaaaattagctgggcatggtggtgcatgcctgtagtcctagctacccagggggtcaaggcaggagactcgcttgaacctgggaggtggaggttgcagtgtgccgagatcacaccattgcactccagcctgggtgacagagtgagactccatcttaaacaaacaaaaaaagaagacatacaaatggccaacaggaatatgaaaaaatattctaatccctaatcatcggagaaatgcaaataaaaaccacagtgagatatcatcctaccctggttagaatggctattataaaaaagacaaaaaataacatgcctggaaagattccatcccagaaaagtgaactcttcttttttttttttttttttgagacagagttcactcttgttgcccaggctggagtgcaatggcaccatcttggctcaccgcaaccttcgcctcccgggttcaagcgcttctcctgcctcagcctcctgagtagctgggattacaggcatgcgccaccacgcccggctaattttgtattttcagtagagacagggtttctccatattggtcaggctggtctcaaactcctgacctcaggtgatctgcctgcctcagcctcccaaagggctgggattacaggcgtgagccaccgcgaccagccagaaaagggaactcttctacactgttggtggaaatgcaaattagtgtagtcattatgagaagagtatggcgatttcttcaaaaactaaacctagaactaccatatgagtcagcaatcccactactgggtatgtatccaaaagaaaggaagtcaatatatcaaaaggatacctgcacctccatgtagattacaccactattcataacagtaaagatacggaatcaacctaaatgtctatcaatttatctatttcttttataagaaaatcctctcaggctgggtgcggtggctcatgcctgtaatcccagcactttgggaggcccaggcgggtggatcacgaggtcaggagattgagaccatcctggctaacatggtgaaaccccgtctctactaaagatataaaaaattagccgggcgtggtggcgggcgcctgtagtcccagctactagggaggctgaggcaggagaatggcgtgaacccgggaggcggagcttgcagtgagccgagatcgcaccactgcactccagcctgggcgacagagcgagactctgtctcaaaaaaaaaaaaaaaaaatctttatcctcattgtttccacattgagtaggctgaggaggaagaggaagaggagagactcattttgctgtctcaggggtggcagaagaggaagaaaatctgtgtataacccagtgtaaacttgtgctgttcaaaggtcagctgtacacacacatagacacacaaaacatgcataatacagttgaatactactcagccataagataaagaaatcctgccatttgcaacaacagagttaactctaaatcagacgtagacaaataccgtgctatctcacggatgcgtggaatccacagaagtcaaactgtcactagagagttgtccaggttcttggcgtgttgaacaaagaattgaacaaaatgcacaaatcaagtaacaaaagaaaatgcaaggagggaaaaaccagcagaagaatggagtaacaaaagcacagattttttttaagttctggggtacatgtgcaggacgtgcagctttgttacataggtaaacgtgtgccatggtggtttgctgcacctatcaacccatcacctaggtattaagcccagcatgcattagctgtttttcctaatcccgtccctcccccggccccttgacaggccccagtgtgggtttttccccttcctgtgtccatgtgttctcattgttcagctcctacttataagtgagaacatgtggtgtttggctttctgttcctgtgttagtttgctgaggataatggcttccggctccatccatgtccctgcaaaggacatgatcatccttttttctggctgcatagtattccatggtgtatatgcaccattttctttttctttttcttttttttttttttttttttgagacagagtcttactctgttgcccaggctggagtgcagtggcgtaatcttggcccactgcaacgtctgccttccgggttcaagtgattctcctgcctcagcctcccgagtagctgggactacaggcacccgccaccacaccctgcttttttgtatttttagtagagacggggtctcaccatgttggccaggataatctccatctcttgacctcgtgatccacctgcctcggcctcccaaagttctgggattacaggcgtgagccactgcacccagcccaccacattttctttatccagtctatcattgatgggcatttgggttgattccaggtctttgctattgtgaatagaaaagcacagatttattgaagacaattcagagtgggagcgggatcgagccagcagctcaagagcctccccaattaaggtttgtaataagctagaaggaacccggcaacacccctagacgcccttcagaggcttccaattggttagatgctatgaaggattggctcaggaccaatcagtggccgtagtggagacccggcccgcagtcaatcagaggctgatgtggcttgttatcaccagggaagacgtgacctgtaagccacacctgctgctctcctgcctgtaggaactggctgcacctgctgaacccctgttcctctaatcccctattctcctgccacaaaactcatggaaacaaagtagaattagaaccgtggttgctgggggctaggaggggagaaaaacagacagatgtcggtcaaagggtagaaacttgcatttacaagatggggtcagcccggcatggtggctcacacctgtaatcttagcacttttggaggctgaggcgggaggactgcttgaggccaggactttgagaccagcctgggcaacatagtgagatctcgtttctttcttttcttttctttttttgagacagagttttgcttttggcgtccaggctggagtgcaatggcgcgatctcagctcactgcagcctcggccccccgggtttaagtatttctcctgcctcagcctccctagtagctgggattataggcacccactaccaggccctgctaatttttgtatttttagtagtgatggcatgattacaggcgtgaggcaccgcaccctgccgtgagatcccgtttctacaaaataaataaataaataaataattacctgggtgtgatggcatgtgcctgtggttctagctacttaggaggctttagtgggaggatcacttgagcccaggagattgaggctgcagtgagctgcagtgagctgcagtgccactgcactccagcctgggtagcagagcaagaccctgtctcaacaaccaaccaaccaacaatcagttctgggagtctactgtacagcatggtgactacagttaacaatactgtatcgcatacttgaaatttgttaacagagtacatcttaagtgtttctgccacacacacacccaaagagaactgtggaggtggctgggcatggtggctcatgcctgtaatcccagcactttgagaggccgaaaggggcagatcacctgaggtcaggagttcgagattagcctggccaacatggtgaaatcctgactctactagaaatacaaaaattagccaggcatgctggcacgcgactgtaatcccagctactcgagaggctgaggcaggagaatcgcttgaaacccgggaggtggaggttgcagtgagctgagatcgtgccattgcactccagcctgggtgacggagcgagacttggtcttaaaaaaaaaaaaaaaaaaggagagagacctatgaaggtgatggaacaggtagtgctcatttcagaatgtatacaaatatcaaaacatcatgatgttcatggtaaatatactcaatttttatctttcagttatgcctcaaaaatctggaaaaagaaaaaaaaaaccctttagagtggaggagaaggaagcaagtggggcacagggagaaacgagctgagacacagaccaaccccagcgtcagctgagacttcagagacttctgaggctggaactgccctgcagaggccaccatcagggtcaggatggtcagaactttatacctagtgggctcccctaagaaaaagtgtgactcaggcgagggactcgctgcacacacgcctctgtgggatactttatttatttatttttgagatagagcctcactctgttgcccaggctggagtgcagtggtgcaatctcggctcactgcaacctctgcctcttgggttcaagcgattctcctgcctcagcctcctgagtagctcagattacaggtgcgcaccaccatgcccagctaattttcttgtatttttagtagagatggggtttcaccatgttggccaagatggcctcaatctcctgatctcgtgatccacctgccttggcctcccaaagtgctgggattacaggtgtgagctactgtgcccggccttatttatttatttttgagacagagcctcactctgttgcccaggctggggtgcagtggtgcaatctcagctcgctgcaacctctgcctcctgagttcaagtgattctcgtgcctcagcctcctgagtagctgggtctacaggtgtgcaccactacatctggctaatttttgtatttttggtagagatggggtttcaccatgttggccaggctggtcttgaactcctgacctcatgtgatctgcctgccttggcctcccaaagtgctgggattacaggtgtgagccactgcacccagcctggatgctttattttaatgatttcctttctgtcccactacagccctgtgatttaggcttattgtgtctattttactgaggagtaagatgacttactcaaactcaggctttatttattcatttatttatttagaaacagagtctcactctgttgcccaggctggagtgcagtgggacgatctcggctcactgcaacctccacctcccgggttcaaccaattctctgcctagtctcccgagtagctgggattttaggcgcccgccaccatgcccggctaatttttgtatttttagtagagatggggtttcaccatcttgcccaggctggtcttgaactcctgacttgtgatccacccacttcagcctcccaaagtgttgagattacaggcgtgagccaccatgcccagccttttttttttttttaaatgttcaaatgggaaccacttggacttggtcctctcactctccctcttctgaaggaagagcatggtcatcaacggggaatggcagttgcagcaaacaactccaggagctggcttctcgttctggagagcaccctgtgcctcctctgcctggtttcctgtgctttacacatccagagaagcttctgtagtaatgaaccatagacacgatgcctcaaagtgtcatcttcaaactcgctctgaattgaaagtataatcttcagccagctgtggtggctcacgtctgtaatcccagcactttgggaggcagaggcgggcagattgcttgagcccaggagtctgagaccagccagggaaacatggcaaaaccctgtctctactaaaaatataacaatgagcctggcatggtggctcacaattgtagtcccagctacttgggaggctgaaatgggaggctcacttcaacctggcaggttgaggctacagtgagctgagattgcaccactggactctggcctggaggacagagtcagaccctgtctcaaaaaaagtataatcttcaaactcaagctcttcattggggatggggctgaaatctgagtccagttctggccgtcacaccagtgcgactcccacacacttgctggtgtcctgttgccatggagacctcttcactttggaaccatccctgacatctccctctccaattgaagcccaaagcctgggcccctcaggggctgtcctgtgtggatcttgatctccgagtactcggtggtgctgggggcctcctggtccgcaggctcccagagcctcaggccctggaagctgagggaggcatagtggagctcctgctcttcccccttccccggggtgtaggtggctgcacctgggggcgggtggtcttgggagctgcctgccgagcattcatgctggtgaccctgaatgcaggggagaaagggggtcaaattagggtcatgggggctaagcgagagcaaggaggatgcacaagaggatctggaaattgagtatttcctgtttcacctactcattccacaaaggtcagctgggccctcattcattcactcattcattcattcactcattcagcaaatatttgagaacaataacatctagctcttggtaattcactgccagactcataaaatcctcaccacaatccagactcataaaatcctcaccacaatccactggggagacactattgtctccatgatcagatggagaaatgaaggctgagtaaataccccaaacccgcacatctaagtagcggtcaggccaggattcacgtccaggtttctctgactccagtgcccgctgccttatggaacagctcccctgtgccagcccctggatattcccgggggaactagggagacaccacccctgatctcaggcagcttgcagtatggaagaagaagtagacacattaaagctatagtcaatgaagttactatctaattgcaaattataagtggatgcccaggaaggaggaggtgtgagaaagacagggatttgctcggacctggactgacctcaaagaccttggaagatctactcggacacaattgtgaaactgagctaggagctcaagaaagaaaggttactggaagtaaaggattccccttgcccagagaaagcttcaaccgtttgtgcccaggtgctgggaaggaacctctaatgtagggccttggaatatcctgctggtaggagcatccctgttgacctgggaccacaagccaggccacatagtttacgccagcactgggacttacggcggggcctacgtagcatcagtttggctctgcaggggctgaggaactgaagtcagtggcaagtcccccatgcctgcgtgacccacccccagtgaaccctggacccaggtttggtggagcttcccaggtgagcggtgccctgatgctccgtgcatctgtcacacttccttgctgggagaattgggtgctgtccccatggctcccctgggaaaggccaccggaagctgtgggtttggtatctcctggacctgccctgagcacctcttcctgtccatgattttcatctgtatcggtcactataaaccatcaccacgaggatcacagctctcagtgagtcctgcgagtcctagggggttatccaacctcagagtggtcgtggggaccccacaactgtggttggtgtcagaagtgaggatggggacccttagctttgtagtagacaatagtcatctgaggaaaggactctctggcatcctgtgttgaggaggagagataggagggagggcaaaggagtcggggatgcaggaggaaatgaggagtgggaggtggagggtccactggatctgagcacaggcagagtatggacaggcctggggggcccttggttctgggaggggatgtagggagcagtggggagggtgcctcccagatcatgggacttgggactgcattgatggggacccaggagcaaaaccctatttggggcacaatgattctgcaagtcaccaagaggactacccatggccatcaaggaaaggggaacaggcagggccccagcagacagaggctgggctctcacctgggagatgggtcccagggtggagggcacgtcctgctcagctgctgccctcttgcgagcttccttcctgcagatcttcaccctgagggaggaggcagtgcccttcagcctccaggctggtccagagcctggggaaactgctacccacatggcttagcagaggctggaaggctgcagagcccagtggggtggggacatatccacggggtgacttccatagtgagaactggggaccctcatagatggcccagatcagggctctggagcagacccctgctctgatcctcttgcccaaggcctagttctcacacccactgccccatctagattcctgcagctgggactgtctgggattctagaaccctcacccttcccacaccctgcattgcctgccctccgatgcttacctgaagacgacaaggcaggaacagaaagcgagcagggcagcgacgccagctcccagggcagcccccaggccaagtcctcccccatgctccagcttccctgcatgggagcagggtttggggtggtgccctcctggccctgagaccctcctgccccttcctcccacagacctagagctctcggattcttcatccccaactgaggcagaaatttaaaaataaatatgcattcattcactccaagaaaagtaacaggcaaggaaagggttaaaaaaagaacaacttttcctctgcttagcaaggctcacttcaaggacagttataagataatactgtttaaaaagccaaggccaaaggaataggctccagacacacccccttccagagcaaggttgaaggaaaacaagaaagaaaaacaaattcctttactgttactcctttccctggcttcttaagcataactatgttttacaaatgtctgtatttagccagttctttttttttccttttgatacagctacaaggccaccagctatgcaaggccacaagttatgctatactataaattatgtcacctatcctaaaattaactgcctctgttttacttttgtaagtctgctcataaaaacctcgctctgtctttgtttcatgctcagctttttagatgcgagtccactgagccggtttgcacctaaaataaacaatcctcctgttctccgtatcggtctcaccagtcctcagtttcccgcagcatttttggcgaccacgaagggaccagagacggtaggtttactgcctcctttgcctctgggggctggagccccgggcctcaggagacctgtgaccccaggtgccactgggtgaacttcagcctggaggagaaatcagctctcccctgagccggcgcccctacccagcagcacaacaaaacctgaaaggagctacagaatgatttcagaaacagtgtacgtcaggaaccacagtaaccttttggggaccaaggcaggacccatcccatagggatggaaggggaggctgatcacttcttgcggggtgcctaacagtccgacccagaggggttgggggcagcgagagtggctcgtcgatttggatgaaactcacaccccaaccatcacaggatgtgagaatggtttgctaagtcgattaggaaaaggaaactggaggtggcgagagtggcttaccaccctaattaggaacttaggaactgggagtggggaagtgtgtaacagtgtgtaaatgaagaagccttattaggctgatcagccacaaaatgggaagtcacaattctcttagtgtggactgggtgctccgagcaaagtgtggggccaactaagactagtggtgatctgcgtatggctaataggagctgccctacagctcagagttgtagcaggaataaggaactctccaaagccaagtagcttctgaaaactcccgtaataggagatggtatagttggccgaaactagaggaagagtgagtgtgctgggccgtaaaggaaggaatagaaggaaagtccatcaaaacttactccattgaagtgcatgttacaaaactttaagaaaggttttgcaggggattataaagttaagctaaccccccaaaggttgagaactctctttgaattagaatgactttcttttgatgttggatggctgaccgaagaaactgtagactaggaaacaattgggcatgtattaaagatggtgataggggtctgaggacagcctgagtatcccgatcaatttccttatattgattcatggttaaatacagcacagacaagactaacctggatcaagccctgtttagcagcttattgcaaaacacttgtagcccgagccaaaaataaaagtaagagcagcttcaccgactgacacgaagttaaaagaaaaaccccagaaagagcaagagaagccagttttgcaacagctgccagaggaaacagaaattcctcctccatatgtcccagcctacccccctttactgaggccaacagccctccaggaaccaaattcaggagctagcatgccctgagtctgaccccgaagggaaggactggagcctcaaaaggccagggaaggaagtcaaaatagtcaagcaggctgtctcagatctggccgtgcttgagctatgcaaatgcctgctcgagctatgcaaatgcctgtcagggagatgtgaggacccacttattgtaataaccaaggccaggttcggaggtggggggcaacgcaccttcatctatcagccctttctgactactgagctactgatctactgaactggaaacaccatactccctcctacatggagaagcctcaagctcttatagatctgacgcaatccgtctttctgacacacagtccaacctggccagattgcaggcagcttttcctaacgttatttaacactaaaaagcgcaggagagtaacataggcagctctcccctggctaaaaccccatgcaccagcagatgcagtgaatgctcaggcatacactcaaggtcagttctcataccaagatcccaactggaacccagaggatgcaactcagcttcagcatttgcaaaggtaccaagagacacttctgcaagggataaaagctggtggaaagaaagcaattaatatacgaaaaatttcaaaagtgcttcagagagctgacgagagcccaagtcagttttataaaaaactttgtgaagcattccggccttacaccctatttgaccctgaggctgctgaaaatcagcgcatggtaaacacagcatttgtagggcaagcccagggtgacgtcaagcggcagctgcaggcatgaatgccacccagcttataaaagtgaccaccaagatgtacatgaaccatgaccagagaacaaaacgggaaagagcgaaagcaacaagcgaggcaccaagcagctaggcacaccaagggtttagtccctctcctcagcctggctctatctggaaaaagagcggggcggggactggccccagaaaaaaagccaaaaaaaaaaaaaaaaagaaaggcataattcttacaacttgcggcaggcatctaccaagcctctgggcctataacggcccaggggtggactacggctgtgcagatcctacctagcccaaaaaagtaagtgtgaaaaaggaaaaaagaaaaatcagaaagaaacagtaaagatagatggcagtgcgtgcgtgcacaggggcggggcccacgccgtagcccagtcccactggccagctgtaggagcaggataactcaggaaggaaaaaggaagcagaacataggcttaaaaaaaaaggccaatctgttggcagcagccctcataaaaagaaaaattagcaggccgggcatggcggctcacacctgtaatcccagcactttgggaggccgaggtggacagatcacagggtcaggagattgagaccatcctggctaacactgtgaaaccctgtctctagtaaaaatacaaaaaaattagccgggcttggtggcgggcgcctgtagtcccagctactcgggaggctgaggcaggagaatggcgtgaacctgggagttggagcttgcagtgagcagagatggcgccactgcactccagccagggcaacagagcgagactccgtctcaaaaaaaaaaaaaaaaagaacttgtacttatggccgggcgcagtggctcacacctgtaatcctgttaccagagcccactcctttagcagaaaacctgtttgctcggctgcctaaaaacattgtcggcagcctaggcatttcctcatactatgtttgcggagggactaacacggaagaccaatggccttggaaagcaaaaaagttaatgccacaaaataatttaactgactcttctcccgaaccgacgcccacaagttcaagcgtctggctcttaaaaacttctattatcaggaaatactgtgttgctcgctggggaaaagtttttacaaacccagtaaaagaactaaactgcttaggacagcaatatgacgataaaacactaagaaacactttgtggcggggcaaagatgaatgcaaatgacctcatccaaatccgttccctgtttctcttctttaaatcacacctactatcagccgaaagctccaaatacttggcaagcacctcctagtctttgttggatctgtaggccatgggcatatcaacagttgccagctaaatggacaggggcctgtgtgcttgaaacaattagaccgtctttcttcctattcccactgcaacagggagaaactttaaggtatcctgtctataataaagttaaaaaaaatgcaaacacacacacaaaaataaaaattaaaaaaattgaaaagacacaaattaaccccctgaaaaaataattcaatagtataggccagctacctgggcacaaaatgggtcatggggataccacactcctatttacatgcttaaccgcatcataaggttgcaggcagtacttgaaatcatcactaataaaacagcaaatgcattagatttactggcccagcaacccacaaaaatgaagaatgttatctatcagaacaggttagctttggactactcctagcccagaaaaaaaaaaatgtaaaaagttcaatctaactaactgctgcctaaaaatcgctgacaatgaaaaggcaattataaaaataactgcaaaaataaaaaaattagcccatgttccagttcaaacttggaaagggtggtctccagattctctctttaaggactggttttcattttgcagagggttcaagactttaataaaagtggttctggccatactaggaagttgccgaatactcccttgtctcttagctctccttgttggaagcattcaatcaactataaaggcaatagcagctaggcaaactaccactcagctaacggctctgcataaatatcaacctttgtctaaagaaaaaaagtgtctcttcatgcagaattaagtaatagtaatgccttctattaaacttcttttataaaaaacatcaaaagggggaaactgaggcaaaaatttaaaaataaatatgcattcattcactcccaaaaaagtaacaggcaaggcaagggttaaaaaaaaaacaaaaaaaacccaagtctttctatgcctagcaagctcacttcaaggacaggtataaaataacactgtttaaaaagccaaggccaaaggaatgggctccagacacaccccttccagagcaaggttaaagaaaaaaaaaaaaagacaaattcttttactgttactcctttccctggcttcttaagcacaattatgtttcacaaatgtctgtatttaaccagttcttgtttttcttttgacacagctacaaggccacaagttatgcactatataattaaccgcttttgttttacttttgtaagtccgcttataaacacactgctttagccgggcgcggtggcacacgcctgtaatcccagcactttgggaggtccaggtgcgtgaatcacaaggtcaggagttcgagaccagcctggccaacatagtgaaactaaaaatacaaaaaaattagctgggcgtggtggcgcatgcctgtaatcccagctactcaggtggctgaggcaggagaattgcttgaatccgggaggcagaggttgcagtgagccgagatcgagccactgcactccagccttgctgacagagcgagactccatctcaaaaaaaaaaccaaaaaacaaaaaaaaccccttctttgtctttatttaatgctcagcttttgaaatgtaaatccactaagctggaacttaccttaaataaacaatcctcctgttctccatattgctctctccgttcctcagtttcccgcaacaactaccagccacagagcagggactttgtccccatcccttcccaccacgcccacaccctctccccacaaccttgaaccttcatctttctaggatcctgtctcctttctccctgaacctcagccccccacagtcccctcacctggtagcagctggaagacagagccactctgggccccgtggacgttccaggccttacagcggagcctgaggccggagctgagccctccatggaggctcagggagctgttggcccagggcccggctgagctgggggtgacctcgaaggagccctgactgctgttcccctccagcagctcctccccaagccaccagcgcagagagggggccgggctggcctgggaggagcagctgcagtgcagaccctcagcctcccaggagcaggaggggcccagcagctgtggagggtctgtggggagggaggacaggactcagcaggggccccttcctgggacccaggtgtcccctttcccccactcacagtgcacggagaggctgagagagacgtgctgggagcccagagggtgctgagcgtggcaggtgaactctccttcgtgctccatttgaatgggtggcagctccaggaccccggggtctgagggctgggaggggcccacggtctgtccccaccgggtccagctcagcctggctggggggctgctgtgggtgacacagaccaggcgcaggctttggccctccaggaccgggagggatgtgccgttcccgaggttttccaggactagggaaggaagaggcagaatcgacgtgcagctcagggctcagggaccctcctgtgtggggaccctccagactcctgggcccccagtttggcactgagaggccctggctcctctgtctcctttcctacctgtcctgtttgcttgggaaaccatcactctcaggttctctggaggatctgaaatggagacaggggaccggctctagacagaccaggggcttccctctgggtaaagggaactatcctggacactgaggtgggggaagtgggtgggatagaagggcagggcagaatcacccactgagtcccagacacaaactgcatgagggtctacacaggtaagaaggtcagtccccgaggcctggggttcaagaccccctcagctctgggaccctgagcccagcccctgtatccctctgccctcccaatggactccaggcccctgctaggcacactcacactgcacagagaggtccagggcttgctgctgggagccaagcctgttctccgctcggcaggtgtagcgccctgaatccccggcccttaccccacgcagctccagccccagggttctggggccccaggggtgggacgaggagaggactctgtcctgcaggacccagctcagcgtggcagggggctggctgtcagcagcacagaggagccgcaggaactggcctttctgaacttccagatatatgacgtttccctggagttccagggctgaagacagggaaagagagagggtgggggtggagagagagaatgggtgggagggggggctgcaaagaggaccacatcccctcacccccctgaagccttttcatccctaaagaggactggcccagccccagcccgaaggccctcagtacctgacgtgttgtcatgtgaaatgctgataataaggtctttgggggcatctgcaacaagattgtgagctggcttcagggagggacaatttgttcctcacacctggaaaaaactccctcagggaaaagaaagtgggaacatcccaggatggacaagtgacaaccagctccagggctcacacatgtggacagaggatcagacgccattcccatccccctcccagggctgagccggcatcctgggaccccacagcttcctctccctggatgctcctgagctgggagccactcactgtcccgctgggctcctccacctccccacccaccggggctgtctgcacgccccaccctcccaggccacactcacaggccacacggagtcggacggtcctctgtgcgctcacaccctttctggagaagtccacatggcaggtgaggtcggtgtcgtggtcctgggggctgggcgtgaagctgagcactgagaagtgggaggtgcttggtctggttcttctaggggagagggcagcccccgtccaggagaaagaaggggctggacatttcttgaaagcccagttaaacacacagatgaccgtcaccggctgcccgggctccagggtctcggggatgtagacatcaggcttcttagtcagggctgggacagagaccgggtgggagattcttgtgctgcaggggtccctgagagccctctctgctcagcccatagcctgtccccagggtccctccccagtgtgacaggcaggggttcccaccccattccatacctgttacttttagaaagaacgcattgctcaggaaactatgtctcacacggcttcctctctccacccgaaagaagtaccatgcctcatcctccctctgcgcgtctctgatcaccaaggagcagctccctttgccgggatccccagtgagctggaatcggtcccgggtgctcatttccacctctcgactctggttgttagtggccacaggagcacccgtctttgggctggtccgtcctttgaaccagtagccataagcagcagtagactcgtcccagccatcccgggggtaggagaggttgcaagacacgatgacacacaggccctccggcaccggcacctgcctctgcacttgaagactgtaactgggatccttgttcagggaccctggggagatgcagaggctcagcggcagccccagcccctgcctgggacccccagccaccgacccactcacccgcccccagcacgggcagcagcaggggcagcagcagcatctctgggctctggggctgggcctgtcccgggaccatctggcttctgggccggcctggctgggaaggaaactcctccagcaggaagcctggtggaggggcagtgaccatccacagaggaggagcctcgggaaccgctatgtcctgaaagctcgcttcccaacttctcctttcacaggggaagcagcagggcagagggcatgaggaccagccccaaaccaggaaggagccaccctggccagcctcggaggtgggcagtgctaggaggggactgtcaggggacacaggtgagtcacggctgcaggtgaggtgatggatgcagagtctcattcattcattcattctccagggggccatgagacactggaagagtctacaagaacacagtgatttatggtgggggctttgcaccacgtattattgctgtatctccacagagggtaaaaactaggtcagccacacaggcagtcagctgcatctacgtgaccaacccccagtaaaaactctgaatgccgaggctcaggtgagcttccctgggtggcaatacttgctgtatgttgtcactcatctttgcttcaagcattaagcgctttctgtatgacttcactgggaaaggacaactggaatcccacatatggtctcttctggatcctgtcctatgaacctttctcctttgttgatttttatttatttatttttattttattattattatttttttgagatggagtctcgctctgttccccaggctacagtgcagtggtgggatctcagctcactgcaagctccacctcccgggttcacaccattctcctgcctcagcctcctgagtagctgggactacaggcgtccaccccaacgcccggctaatttttttcttgtatttttagtagagacagggttttagcgtgttagccaggatggtctcgatctcctgaccttgtgatccgcccaccttggcctcccaaagtgctgggattacaggcataagccactgcgcctggccattttatttttatttttgagacagtctcactctgtcacccaggctggagggcagtggtgcaatcttggctcactgcaacctccgcctcccaaggtcaagtgattctgctgcctcagcctcccgagtagctgggactacaggcacccacccaccaccatgcccggataattttttgtatttttagtagagatggggtttcatcatgttgagcagcctagtctcgaactcctgacctcaggtgatctgcctgcctcagcctcccaaaatgctggcattgtaggcgtgagccactgtgtctggcttgttgatttttttttttttagatgaagttttgctcttgttgcccaggctggagcacaatggcatgatctcggctcactaaaacctccacctctcaggttcaagcgattctcctgcctcagccccctgagtagctgggattactggtgcccaccaccatgcccagctaattttttgtatatttagtagagatggggtttcaccatgttgactaggctgatcttgaacttctgacctcaggtgatccacctgcctcggagtcccaacatcctgggattacaggcgtgagccactgcgcccagccctgccttgttgatttttaaaaagtatttttattaatatgtgatatttgtacatatttatggggtatatgtgatattttgtgccatgcatagaatatggtataatcaagtcagggtatttgaatatctgtcacctcaaacatttattatttctattgttgggaacatttcaaatcatcttttctagttattttgaaaaatacaatacgttattattattttttaagacagggtcactcaggctgggcactgtggctcacgcctgtaatcccagcactttgggaggccaaggcgggtggatcacaaggtcaggagatcaagaccatcctggctaacacggtgaaaccccatctctattaaaaatacaaaaaattagctgggcatggtggcacgtgcctacagtcccagctactcaggaggctgaggtgggagaatggcgtgaacccgggaggtggagcttgcagtgagctgagattgcaccactgcactccagcctgggcaacagagagagactccatctcaaaaaaaaagaaaaaaaagaaaaaaaagacagggtctgtctgtcacccaggctggagtgcagtggtgagatcacggctcactgcagctttgacctccccaagctcaagcaatcctcccacttcagcctcccgagcagctgggactacaggtgtgcactaccacttaatttttatactttgtttttgatagagatggagttttaccatgttgatcaggctggtctcaaactcctaggctcaagcgatctgcctgtctcagcctcccaaattgttgggattacaggcatgagccaccactacaatatgttactgttaactatagtcaccctactctgctattaaacataagaactattccttctatataaccgtatatttgttagacagacctcttcattccccacctactcacccatgcatccttctagggttccgataactattattctactctctgcctccatgagatcatagtccatgatctctgtatgcctttatgtatccatagcttagctcccacttaaaagtgagaacataatggcatttgatttttcattcctgagttatttcacttagaaatatggcctccagctctgtccgagttgctgcaaaagatattatttcattctttttttatggctgagtaatattccatgacaatggtatacataccgctgcctagaccaatgtcctgaagagtttttcctaggttatcttctagaattttttggtttcaggacttagatttaagtctttgatccatattgagttgaatttttttttttttttttgagacagagtctcactctgtcgcccaggctggagtgcagtagcatgacctcggctcactgcaacctccacctgccaggttcaagcaattctcctgcctcagcctcccgagtagctgggactacaggtgcccgccaccatgcctggcttgttttttgtatttttagtagagatgacgtttcaccatgctggtcaggctggtcttgaactcctgacctcgtgatcctcccgccccggcctcccaaagtgttgggattacagtcgtgacccactgcgcctggcctaatttttgtatttttaatagagatggattttcaccatgttggccaggctggtctcgaactccttacctcaagtgatccacctaccctggcctcccaaggtgctgggattacaggcatgagccactgcgcctggccaaggattgatttttgatgttttttttttttgagacagagtcttgcatctcgctctttcatccaggctggagtgcagtggcacgatcttggctcactgcaacctctgcctcccaggtagctgggatgacagatgtgtgccaccaggcctggctaatttttgtatttttagtagagacgaggttttaccatgttggccaggctggtctcggactcctgacctcaagtaatctgcccacctcaacctcccaaagtgctgggattacaggcatgagccaccacatccagcctgattttaatgtttatagtttattggcgcttaattcaggtcttggtgctttcagggatgaaggttctgtatgagttccttggttgtagagagtccttgtgcgctggcttctcagttgctggctgcagtggcaatgtgctcagtaagatggtgatcaagttcatcatctcctgtggggttggaatggcagaggtcttttgaagcttaccttgttccactgtggtgtgcacttttaaattaatttatttttttccccagtattttattcactgggttgaatcattaaggcttcaggttagtggggacgtgtctctgggtagaaaacagttgtggctggccggtgcggtggctcacgcctgtaatcccagcactttgggaggctgaggcgggtggatcacgaggtcaggagatcgagaccatcctggctaacacagtgaaaccctgtctctactaaaaatacaaaaaaattagccaggcgtggcggcgggcacctgtaatcccagctactcgggaggctgaggcaggagaatggcgtgaacccaggaggcggagcttgcagtgagccgagatcgtgccactgcactccagcctgagtgacagagcaagactccgtctcaaaaaaaaaacaaaaaaaagacaaagaaaaaaaagaggccgggtgtggtggctcacgcctgtaattccagcactttgggaggccaaggcgggtggatcgtgaagtcaggaggtcaagaccatcctggccaacacggtgaaaccctgtctctactaaaaatacaaaaaactagccaggcgtggtggcgggcgcctgtagttccagctacttgggaggctgaggcaggagaatggcatgaacccgggaggcggaacttggagtgagccaagatcacgccactgcactccagcctgggagacagagcgagactctgtctcaaaaaaaaaaaaaaaaaacaaaagaaaagaaaagagttgtggctaaagcactgggtaaatgcagtacccaatggtgagccaaggcccccgccttgacagaggtggctgggggagctcttagcaacatgcgctgaggtttgcttttgcttttttgtttttgacaggatttcagtctatcacccagggtggagtacagtggtgtgatcacagatcgctgcagccttgacctccctggctcaagtgctcctcttgcctcagtctcccaggtacctgggaccacaggcacatgacaccgtgcctggtcattgttaatttttgtagagttggggtttccctatgttgcccaggctagtctctaactcctggtctcaagcgattctccaacctcggcctctcaaaatgctgagatgacagccgcaagccaccatgcctggccatttccttccttgtactaattttggtttattcttgcttttctggttccttggggtccatttttttttttttttttctgagatgcagtttcactctgttgcccaggctggagtgcagtggcacagtttcagctaactgcaacctccacctcctgggttcaagcgattctcctgcttcagcctcctgagtagctgggattacaggtgtgccaccatacccagctaatttttgtatgtttagtagagatggggtttcaccatgttgtccaggctggtcttgaacccctgacctcaggtgatccacccaccttggcctcccaaagtgccaggattacaggcgtgagccactgcgcccggccaggggtccactgttatgttgtgtatttgaattcttctatctttttttttgaaagaggcatttgttgttataaacttcactcctggcacagcttttgcagtatctcataggttttggtaggctgtatttccatcttcatttcaataatttttttttttttaagacagagtctcactcttgtcatccaggctagattgcaatggcaccatctcagctcactgcaacctccgcctcccaggttaaagtgattctcctgcctcagcctcctgagtagctgggattacaggtacatgccaccatgcccggcaaatttttttttttttttgtatttttagtagagacagggtttcaccatgttggtcaggctagtctccaatgcctgacctcaggtgatccaccttggcctcccaaagtgctgggattacaggcatgagccaccgctcccggccgcaagaagcgtcttgatgttctttttaatttcttccttgacccagtggtcattcaggagcatgctgtttaatttccatatatttgtacatcttccaaagttcctcttattaatcatttctagtttcacttccattgtggtctgagaagatgtttaatatgatttcaatttctataaatatgttagatttctttcatagcctcacatatggtgtatcctggagaatgtttcatgtgccaaagagaagactgcgttcttcagctgtgggataagatgttctgcaaacatctcttaggtcccttgggtctaaaatgcagtttaaatccaaagtttctttgctaattttctgtccagatgatctgtctaatgctgagagtgttcaatgtggtgttcaagtctccaactactattgtattggagtctgtctctccccttatgtgtgctccagtgtgaggtgcatataaatttagttacgtaaagttatatcttcttgctgaattgacccttttatcattacgcaatgacttaaagtctgtttttttttttttaagtctctttttttttttttttttgagacggagtcttgctctgttgcccaggctggagtgcagtggcgcgatctcggctcactgcaagttctgcctcccaggttcacgccatcctcctgcctcagcctcctgagtagctgggactacaggtgcctgccaccacgcccagctaattttttgtatttttagtagagatgggatctcaccgtgttagccaggatggtcttgatctcctgacctcgtgatccacccgcctcggcctcccaaagtgctgggattatagacgtgagccaccgcacctggccttttaagtctgttttatctggagtaagtataactactcctgcttgtcttttttggtttctgtttgcatggaatatttttttcaatctctttgttttcagtgtatatgtctttccaagtgagtgactttcttatatgtagcataaagttgggttatgtttttgtaaatccatttagcaaaacatcaaattgtatccataaacatatataattattattatttgctaattaaaaataatataaattgtagtaaaatacccataacacaaacctactactttaaccactttattttttatttatttattttttttgagatggagtctcactctcttgctcaggctggagtgcagtgacggatctcggctcactgcaacctctgcctcccggatttaagcaattctcatgtctcagtctcctgagtggctgggactacaagtgagcgccaccatgccctgctaatttttgtatttttagtagagacggggtttcgccatgttggctaggctggtctcgaactcctgacctcaggtgatccacccgcctcagcctcccaaagtgctgggattacaggcatgagccactgcatctggcctactttcatcattttaaagtgcacaattagctgggcatggtggtgcatgcctgtaatccctgctactcgggaggctgaggcacgagaactgcttgaaactgggaggcagaggttgcagtgagccgagattgcgccactgcactcagcctgggtgacaaagtgagactcaaaaaaaaaaaaaagtgtacatttcattggcactaagtacattcacattcttgtgcaaccatcagctccatctagttgcagaacttttccatcattgaaaaaagaaaccaagtacccattaaacagtcacttcccattcttccctccccccaggcccccaaaatgacaaatctacttcctgtcactacatttgcctcttctggtcatatcagatgaacagaatcatgcaatattgtctggtttctttcacttagtataatgttgtcaggaccatctatgctgtggcaggtgtcacaatgtaattcttttttaggggtgaataatactccattaaatgaataaaccacattttgttcatggagttttaaatttgctagttaatgtccaaatcctcagccttggggaatcgggaggtgctggggcccctgcccttgagtctgcacaacccagacccccctctatgcccaggtggtaattggggctgggctgagccacaaactagtctgggcatcagggtggggaggtgacagagctgggaccctgtgatgtaaggtccaagttccccagtgggggctccatgaaccaattagacctcatttacaaaacacagatcaaaagataaattattaagaatgtccagggggcaacctcagagcactaaaccccaagcatgaggccccctgagctcactggggtcttatgtaattgcccccttctccctgtggagctgggagcctggtgtaagctgcagagacggccccgcaacaggcaggggagctcagtgcctttggggagcccggggaccctgagttgacataagtggaggtgaggatcctgtgggcagggattggatggtcatgtcttctttgcctccccccactgcatggagtagattttgcctggagaatgaatgaatgaatgaatgggactctgcatccatcacttcacctgcagccatgactcacctgtgtcccctgacagtcccctcctagcactgcccacctccgaggctggccagggtggctccttcctggtttggggctggtcctcatgccctctgccctgctgcttcccctgtgaaaggagaagttgggaggcgagctttcaggacattgcggttcccgaggctcctcctctgtggatggtcactgcccctccaccaggcttcctgctggaggagtttccttcccagccaggccggcccagaagccagatggtcccgggacaggcccagccccagagcccagagatgctgctgctgcccctgctgctgcccgtgctgggggcgggtgagtgggtcggtggctgggggtcccaggcaggggctggggctgccgctgagcctctgcatctccccagggtccctgaacaaggatcccagttacagtcttcaagtgcagaggcaggtgccggtgccggagggcctgtgtgtcatcgtgtcttgcaacctctcctacccccgggatggctgggacgagtctactgctgcttatggctactggttcaaaggatggaccagcccaaagacgggtgctcctgtggccactaacaaccagagtcgagaggtggaaatgagcacccgggaccgattccagctcactggggatcccggcaaagggagctgctccttggtgatcagagacgcgcagagggaggatgaggcatggtacttctttcgggtggagagaggaagccgtgtgagacatagtttcgtgaacaatttgttctaaaagtaacaggtatggaatggggtgggaacccctgcctgtcacactggggagggaccctggggacaggctatgggctgagcagagagggctttcagggacccctgcagcacaagaattccccaccccggtctctgccccagccctgactcagaagcctgatgtctacatccccgagaccctggagcccgggcagccggtgacggtcatctgtgtgtttaactgggctttcaagaaatgtccagccccttctttctcctggacgggggctgccctctcccctagaagaaccagaccaagcacctcccacttctcagtgctcagcttcacgcccagcccccaggaccacgacaccgacctcacctgccatgtggacttctccagaaagggtgtgagcgcacagaggaccgtccgactccgtgtggcctgtgagtgtggcctgggagggtggggcgtgcagacagccccggtgggtggggaggtggaggagcccagcaggacagtgagtggctcccagctcaggagcatccagggagaggaagctgtggggtcccaggatgccggctcagccctgggagggggatgggaatggcgtctgatcctctgtccacatgtgtgagccctggagctggttgtcacttgtccatcctgggatgttcccactttcttttccctgagggagttttttccaggtgtgaggaacaaattgtccctccctgaagccagctcacaatcttgttgcagatgcccccaaagaccttattatcagcatttcacatgacaacacgtcaggtactgagggccttcgggctggggctgggccagtcctctttagggatgaaaaggcttcaggggggtgaggggatgtggtcctctttgcagccccccctcccacccattctctctctccacccccaccctctctctttccctgtcttcagccctggaactccagggaaacgtcatatatctggaagttcagaaaggccagttcctgcggctcctctgtgctgctgacagccagccccctgccacgctgagctgggtcctgcaggacagagtcctctcctcgtcccacccctggggccccagaaccctggggctggagctgcgtggggtaagggccggggattcagggcgctacacctgccgagcggagaacaggcttggctcccagcagcgagccctggacctctctgtgcagtgtgagtgtgcctagcaggggcctggagtccattgggagggcagagggatacaggggctgggctcagtgtcccagagctgagggggtcttgaaccccaggcctcggggactgaccttcttacctgtgtagaccctcatgcagtttgtgtctgggactcagtgggtgattctgccctgcccttctatcccacccacttcccccacctcagtctccaggacgcttccctttgcccagagggaagtccctggtccgtctagagccggtcccctgtctccatttcagatcctccagagaacctgagagtgatggtttcccaagcaaacaggacaggtaggaaaggagacagaggagccagggcctctcagtgccaaattgggggcccaggtgtctggagggtccccatgcaggcgggtccctgagccctgagctgcacgtcgattctgcctcttccttccctagtcctggaaaacctgaggaacggcacatccctccgggtcctggagggccaaagcctgcgtctggtctgtgtcacacacagcagccccccagccaggctgagctggacccggtggggacagaccgtgggcccctcccagccctcagaccctggggtcctggagctgcctcgggttcaaatggagcacgaaggagagttcacctgccacgctcggcacccgctgggctcccagcgcgtctctctcagcttctccgtgcactgtgagtggggaaaggggacacctgggtcccaggaaggggcccctgctgagtcctgtcctccctcccacagagcccccccagctgctgggaccctcctgctcctgggaggctgagggtctgcactgcagctgctcctcccaaggcagcccggccccgtctctgccctggtggattggtggggagctgcggagggaaacagcagccaggactacttcaaggtcacccccagctcagccgggccctgggccaacagctccctgatcctccaagggggggcttggctccaacctcaggctcacctttgaggcccagaacgtccatggggcccagagctctctgattcctggcggacagtcagggtatagggtggggaggcctgggctcaccaggtcctgcatccagggatgtaggaagggcctggagaaccaagttgcaataagagaggaaggattcggaagtgtggtttagaaggtgaatgggccttatcccacttttccaggcaaatcagggcccatgacgggggtggttctggtggctgttggggaggtggctatgaagatcctgcttctctgcctctgcctcatcctcctcaggtgagccctgccccagggaccaaggggaggggcggagagggcaaaggatacaccgctgaatcccagaatctcaatcctgggggtacttggacagttaaagaggcctgtggccaggcagaggctgagttgatcgtgatgattccacacgggccagtgttgtcagtccccaactctggaccaatgtccaggctggggaggttcctgcttgtatcagggaggtcctgggggctaggcctgctctctctgcctcagtcccctccaaccccttagcagggcacagggaggtgagtctgctgccctcttcacccccatccagccacactcacaggccctggtctcttcacccagagtgaggtcttgcaggaggaaggcagcaagggcagcattgggcatggaggctgcagacgctgtcacggactaatctccaggtgagtgtcgtgggcctcttaccctccaacatcccgctggacacctccccctcgatggccccaaggactgctccactcaacttggccataactgactcatcacctccctttccaagcccacttctcttgttgagagccccatccctctgatgacatggtagccccatctctaacgtcagaacccgggtgtgggtgtccaccttgacctccctccctcctccagatcccaaaaatcactagcacttgtccctcctcctaagtacaggtcaccttggagcccttttctccatcctggccccggtcatgcctgggcctcacctcttccctggtcgctgaacccacctcacctcttgcctccatctctcccaacagactccagactgcttccagatgcctcctcatccagttcctccacagtctgagcggccgtgtttcctctgcaggctttgcatggtctgtcccctgctggactctcctgatccctcctttccctgtcacccaacatctccccaaaccctccgggccaaggactctgcggctcttgacactttgcacgtgtagtttcttctcctgaaacacccttccctcctgccaaaccacgtctggaccctccttcaggttcactttttttttttttttttgagacacagtctcactttgtcacccaggctggagtgcagtggcgcgatctcggctcactgcaacctctgtctcccaggttcaagcgattctcatgtctcagcctcctgagtagctgggattataggcgcccgccaccacgcctggctcatttttgtatttttggtagagacagggtttcaccatgtcggccaggctggtcttgaactcccgacttcaggtgatccgccagcctcggcctcccaaagtggtggggttacatgtgtgagccaccgtgcccagccagctgtgtcttctttttgcaggatttacttacaaaattccttgcagctgcagtctgcgttccacccacatcctaatatggtgtttgcggtggtcacatccaacttccttcctcctccatccatggaacgtgcattagggaggaaccacacgcaccacgtgcaagatgagccagttccctgaacggccggccacggcgttaaccgcgctgctctgggctctgcacgtctcatctgctgaggcgcattactgcatctttcatgcagaacttgctttccatgcctcacatctccacatgtgtggggatatgtcctgagaaatgcacggttaggtgattctgtcgtgtgagcatccttgaatgtgcttacacagtcataaatggtacagcctaccacacgccgaggctatacggtatagcccattgctcctagactatacacctgcacggcatgttcctgtagtgaaagctgtaggcaattataacgcaatggataggttaaagacagagttttagtaaaaatatggcataataggccaggcgtggtggctcatgcctgtaatcccagcactttgggaggccaaggcaggcagatcacaaggtcaggagtttgagaccagcctggccaatatggtgaaacccagtctctactaaaaatacaaaaattagccgggtgtggtggcgggcgcctgtagtcccagctactcgggaggctgaggcagaagaatcatttgaaccaggaggtggaggttgcagtgagccgagatcgcatcactgcactccagcctgggcgacagagcaagactgtctcaaaaactaaaacaaaaaaacaccaccaccaccaccaatgtctgattaaatctaagccacggttccattttggggcaaggggcagggtgtgggtgtggtggacagagaacgggctccagccaccatcagctgcacgtcctggtagcacctgagccattcccagtctcctgtgctgggagatcatcatctaatcctgatgatgacgccctcctctcagagctcgggggatgagctgccaaaacccatggaggttcaaaacccgggctctggagacagaagacactgggctcagagacatggggccactgtccaggctttccctgggcctggacctgggctccttccactgtctgagcagggtcagcctgggctggctgtgctggttcaagagatgagggaggaggacacagcggttgccaggaccctgaggcactggactgggcactgccccaaggggcagaggatggaacccggtgttgatattgtgatgctgacccgtctgctcacctgatttgggtgctgaagggcagctgacccccctaatcttttatagacttgtgaaacgaaaataaataaaagtcaagctgggaacagcttagggcaaacctgcctcccattctattcaaagccacccctctgctcactgagatagatgcatgtctgatcacctcagttgggaaaggctaatcagaaactccaaagaatgcatctgttcatctctcacccatctgtgacctggaagccccctccccacttcgagtcttcctgcctttgcttcaagttttcccgcctttccaaatggaaccaaagtacttcttacatatagtgactcatgtctcaagtctccctaaaacgtataaaactaagctgtgccccaaccacgctgaccatgtcatcaggacctcctgaggctgtgtcacggcctgtgtcctcaaccttggcaaaataaactttctaaattaactggacccgtctcaaattttcggggttcacagactcatgtgcaacaaggggtctaagcaggacaggttcgggggggtttcctattgttagcagatgtccccttctggaaaggggtgcaaacacccactttcagccaggagatggtaagcggttccctgatcccacctgcttctcctgagcagggtttatcagtacaggagagtcagggtatctgagagcacttccttccttacctggcctcagattctccacactccaaagtatgatgcatgatctgagttactcaagacaaaattcagggaggcaggtttagcttctctcttccttttttttctttagacagggtcttactctgtcgcccaggctagagtgcagtggtgcaatcatggcttgctgcagcctcgacctgctgggctcaagtaatcctcctgcttcagcctcccaagtagctgggactacaggcgtccaccaccaggcctagctgatttttgtattttttgtagagatgggtttcaccctgttgcccaggctggtctcaaactcatgggcttaagtgatcctccagttttggcctcccaaagtgctgggttacaggcatgagccacagcacctgggccccaaaagaacttttacagataactgactcctcaagctctggtaaaacaatttattaccaaagcacagaggtgtcaagggtaggaggggtcccccctgtgggccggcccaaccccatccagctttgctaggacactggctgaagggcaggccaccaagatggggaacttcacattcacgggagggaaactggggccctccgggaggctaatcaggactgatgagtatcctgaaaccagtggcaggaatgcacattccagggcttgttctagaagcttatctgtgattaaacagcaggccttgagtcacattacttcatttttttttttctgttgcacactgcaaatggaaagttctggaagacaataaaaatgctgttagtgtctcattcattcaaggaacaccctctatgccttcacttcatgccaagcaccttctaggttctggggatgtcatcttctaggtactggggatgtcatcatgaccatacgggatgaggagcccctgctgggcttaggatgaggaggaggcgggtggagactacacactaaacacacgcttccctccagatgggaacaagggctgtgtggaaaacaggtgacatgatgagcaagtgggtggggaggcagtgaggatgcctcatggaggatggggaaggcctcgggtcttgagaagcagcaggtacataaagccaggatgaggggagctttccagaactcgggatggcaggtgcaaaggttccggggtggggtccagcttggcctggtctagaatcagaggggcgggggtgtggctggtgcatcgtgcacgggggaggaagggagctcggcctcgggccaaggcaaggagctgctgtggagcacaggcaagatgaccttcaaggtgctcgaagatcactgggctccttaaatgccatctcctcgttatgttcccaaccaaggggctgagtgagtggcctccagggagcgcgtgggtgtgagacggtggagaccctgggaggttgtcaggtgtcaggttctaaatgccctttgccctgggtgaggaaggcactgtgagacacagtggcactgacgacgggaagcctgggctcgctccatcgataaacaggatgaagcctctgccctgtgccatgccagaaaagcagagatgacagagtcagacgcgaccctgccctggaggagctggctgccagcagaagactgtgacaagtgaccccgtggtcagtctcacccgggaccgaaggtttggaggaggctgctgggggagcaagggtgttggggaggaccccgagctgtctggcctggataactgggtacacggaggagctgtgtatcgagctggagaggtgggggaaagagggagattggcacaggtcatgactttactctcggcaccactggttgaggcagagagcctgctactccaccacggagaaaagagtccccacccctcaccactggcccactctgtgcgcaggtgctccacgaatcgcttgacacacacgtgtcagctcaggtttcagcctcagatgtaaggaaacgttgtgggaatgcagaagcacttgtaatccaagcgccaagaagaacgtcgctgcgccgggagacaggccgtcaaaaggagatgctgttcaagatgccctgcgactaggatctcacaatcgtggtgctgctgaccacggggccgggggattctttgtggggtggtacaggtgggcaccgtgctgcatgtcacaggatgtcaggcagcatcccggcctccactgtcccgcatcctgacaaccaagtgtctccagacactgccaaatgcccccagggtggtgccaaatcagacaaagcactgagctttggttccagccaactccgatgagagaaatgactactccggggagagaaaaggagcctggagaagctcctcttcagcacacatctctgcacccttgccaaaatttactgtgtagtctgtctttgaccttgtaaaaattcctgcacgtttacacaaagtgctgatggaagtaaagccatctagtcagcactgtcaagttgatacctccatccacagacagcgtgcgccagcagccgggctgtgcacacaggcagcactgttggtaaaataaaaatctgggaaactaagcaaacgcccagctgctggctgtgaggagtgtccgtcatccacaggaaggggtagtgcgcactatgaacgagacccgaaggcatggagcagctaccttttgtgtatgggggcgccaagggggccaggccaaaggaaagtagagactacaggtggccgggtggaaggacagagggaggcatggatgcaagaagggacagaagatggcgagagacaaacaacgtcttgatgctatttttgaggccctgaatcccgttgtgcctgaagctcccccttgtaattttctagctacaacagccaatcaatccccacttttcttaaagccaagttgagccgggtttctgctacttgccattccttgaggctgggaagttcaaggaccgtgcggaaaaacccagtgtctccctgggaagctgggccctggtatgaacgtggaacagcctctgggaagtgtctcctggagcctggggcagggctcgggtgagggcaaggggtgagaggcttaagcctcacaagctcttcccacctggattccacctagggcaccatcgggaggccaatggggtcatatggagacacacgcagatcctgcagcaaagcttctaggttgttcctcagcatggcgtagggcggcttctcctcatacgtgagggccatcaccaccttcaggtacttctgcagggtctctgtggtcaagacaacccccagcaagggagagcctgagaggcatcccccaaccccgatcctgggggtctccacccaaggatggaggggtgggggactgaggggcatgagggtctcagcaaaagtgcccattttcttgttgcctggcattgccagaggacttcaattgtttttcagttttggaaaatgtcatacgcaggcaccagtagaagggcatgaacacccaagtacccatcactcagtttcaacaaggatcacctcacagccaatcttgtttcatcaagacccctcccctggcctgcagtgttttaaagcaaatcccagctagcaatgcagtctacctgcatataaatatttagcatgtatctttaaagagggcgggccctgcttcacctccacctccaacctctggctgaccagcttaaaatcctcgaggcccaaggttcacagaggtagaactggaggggagtgtcacttgggcagctgagccataatctgaacccagggatttaaagtaattcagccgggcgcggtggctcacgcctgtaatcccagcactttgggaggcagaggcgggtggatcatgaagtcaggagatcgagaccatcctggctaacacagtgaaaccccatctctactaaaaaaaaaaaatacaaaaaattagccacacatggtggcgggtgcctgtagtcccagctatttgggaggcagaggcaggagaatggcttgaacccgggaggcagagcttgcagtgagccaagatcacgccaccgcactccagcctgggcgacagagcaagactccgtctcaaaaaaaataataaaataaattttaaaaaaataaataattaaaaaatgagccttagagagccagagggaacaagctatctgtttctgtctgtccatttctgcctccagcttggagaaaagcatcaaagctcttcaggaggggcacaaagacaacaggaaaaacaaacacccccgacaccccaacaagacagtgcaaatacccagtaacagggattggctttataagttacggtgcggacaaaccatgaccattgtgcagctgttgataaaagctgtggtgcatctataaggaagggcatgaaggatggccccagggttaagtgaaaaaagcaagaggtagaatgagatgtatgtagggtgagcttattttttgttcataaaaatggccgggcatggtggctcttgcctgtaatcccagcactttgggaggccgaggtaggtagatcagttgaggccaggggttcgagaccagcctgggcaacatgatgaaaccccgtctctactaaaaatacaaaaaactagccaggtatggtgacgcacgcctataaccccagctacttgggaggctgaggcacgagaattgcttgaacctgggaggcggagactgcagtaagctgagatcgtaccattgcactctagcctggatgtcagagctagaccctgtcttaaaaataaaaaaaaaaaattaccctgtcttcaaaaaaaagttgtgtttttgttttgtttttcagaggcactagtgaatcttttgacgattttgtctttctacaatgggtacgtattacaaatgcaatttggaaaactaaaaaaaatgaagaggtgtaaggagaagccaccccaagatggatctgagccaccaggtcctgcccgagtccccgcctgttcccgctcccttcaggacgtacctgagggcctgatccagtgaccgcagggtcccacgaagggccccggcttatcaacaaacctgaagggacagaaacacatgtgaaaggtctcttagggaaaggagagcaaccttttaaaacagaatgcctaagatatatacacagcctaagatatatacacagtcccctctgccatccagggaagttatgttcttaaagtcactgtgaacactgaatcaaccaatccactaccattgctcccaagggaaacagcactgcttcctgcaagcctctggccacacgattttccccgatcaatacaccttgttttggccgggcacagtggctcacgcctgtaatcccaacactttgggaggccgaggggggtggatcacgaggtcaggagatccgagatcatcctggctaacacggtgaaactgtccctactaaaaatataaaaaactagccgggtgtggtggcgggtgcctgtggtcccagctactcgggaggctgaggcaggagaatggcatgaatctgggaggcagagcttgcagtgagcctagattgagccactgcactccagcctgggcgacagagagagactccgtctcaaaaacaaaacaaaacaaaacaatacaccttgttttatgtatgtttctgttgaaatacatcttatgtaataagtattgttgattcattagcattgaactcttttaatctgtgatccttaagacggagaggatccctttgatgatgaggaaagatccaagatggaaataaagattttattacttacaggtcctgggggcacaccgcacacccaaaggtgacctccccacccgtcccaagcacacacacagacacacacacacacacacacgcacactggtcagggagctcgtggctgtgaggggccaatgggcggtatccaaacattttgaggagattttaactggtaggttcaaagcaagcaggctcgacttcaggaggtcatgctgtgcctgagagggggtcactgtggcatccgcacagttcagtggaatgtgggggccagcggggccgtcaagtaggctgtctgtggctgactcaaagggagggaggtggtcccccggaggcggctgcataacggagatatctgggtcaaccacacggaggaactgggaggaggtggaaaactgcaaactgctgacggtgaccgagccttgtttctggcatgacaaagtccagcttacattaaaatgaatcccaaggcaacctgaaatgataagaattccccacagactcatgaccaacagcaccgtagctcatgcctgaacaaagctgataaaacacacgaattattaaccatctcaggctttgggacatcagacagcccttcagcattatgctaggtggctgtttgattttttgtggagatggggtctcactatgttgcccatgctggtctgatcctcctgtctcggcctcccaaagtgctgggattacagatgtgagccaccacgcctggctgaggccattttaaatggcataatcactgacaaaaagcataaaaacaggaaaaaatgtatcattaactaaacagtgaaaaggacaccagcgtatatagtgtggaggctgaaatagggaggcagaatgctgtctggttccaccctaggctgggaacatgtgtgtcagatgattaaaatttttctccacactgtgtctgtaagtggccatgaaagaacagcaagaattgatttggggttacaactacttttagtgagtaagagaattcacacatatggactctgaataatcaggactgactgtatatgtacatacacacacatacacatatatgtataacacaaacacatgcatgcacgtgcaaccgtttgttcaggaaaaatcctgatttgcccactgcctttgctccatcctccaggcccagcccctccacttctctgcctggcccatcgggccagctcccaccacctgcccagtcactggtctctgaccctgccttcgccatcccccagccccaccctccagtttctcaactctctctgccccatgtcctcctctgccccatggatctggggccagctcagccctcaacctttctccctggacctcaactccttgctggcctcctgtgtatccccatgtggacccagagggtctctttacacctgtccctgaccctccctgctcacagcccaccctccctcccatggctccccagcacacactggccaccctctgactccatctccccactccttcctcccattgcatgtcccagccacaccaaaggactcctaggcccacgaggccacacatccacgcacgtatgcctctgcacatatcgctctcgctgcctgggtggtcttccccaccctgagctctggcaggtggctgttctccctttgagatacagctcgagggcttggcctcccaagaagtcttccccagacccctccaggcggaggaactctgtccctcctgggcctgtgcgtaggtccacagatgtcccatggcggccattgacatacatgcgcaggaaggcccggttgtgccatcaacaggacattatacactgcacagcaacaccactgccaccacctgccatgggctctccctggccaggtgggcagccctaacagcgggtccaaagctggctctcatttgtgctttgcccagcaaggggccttgaatgccagaaagcctcggggacttcaacggcctctcctccttcttttactcattttgtctgtcgtgaactacaatgtgcaaaaaatgagtatctgttgaatgaatggaaaaaggccatgtataccagtaaaccgtcctagcgcagggcaccttagggtgccaggaaacgagcatgtagcaacatcgcccccttgtggtccccttggttattgtctgggctaacagactatgggctgggggtgaggaggtgcatctgggggacagtgtcaacattgccagctactctccagagagcatttttgtgcgcctggccctctatggttgtggtctggagctggggctgtggaattactgttatccatgctgctatcattgatatgagatgattaccatgacctgtcttaactcaccctgcaccatgttggcgagtgcagaccctctctgtgaaccagtcacattcaacaagtctctttagatggggggatgtgaaaagcatgataagaccgctcttaggagttaggaagtgaagtggggagaagactcaaccgaggggagccttggagaccagtttccctgacaagactggagttcagaggcaccatgggctgattctaacctgggtgtccagcacagccactggcctcaggaacctggcactgaatgcgtaagtggagagggttcagagctgtgctgtcctgtctgcctaggaatcttgcctcccccttgcccacctgggaggctcttgtgttctctagagaccaggtcaggcatctcccaggtgagggtttccaggagccggtggcggggtcctgtgcctcccctctgctcccacagtgccgggctacctccaccctcacctgcagctcctgcttcctgtccgtgtctcctcccagccctgaactcccgacattggggctgcgtctgcccgacctctgtgtccacactgaagcctgggcgggctcagcattcactccttagttgttcttcattccactacgatttttctttcctttttctttttttgagacagggtctcactatgttgcccaggctggagtgcagtgacaatcacagctcactgcagcctccacctccttggactcaagtgatccttccacctcagcctcctgagtagctgggactacagtcgcgtgccaccacacccggctactttttttgtagagatggggtctcaccacgttgcccaggcgggtctcaaactcctgggctcaagcaatctgcccacctaagcttccaaactgctgagattacaggcgtgagccaccgcaccagatctgctgctattccttgggcacccacaatgtgtgctctctgttgtatccagagaaggatgtgtgtgtgtgtcacagggaattgaggcccccctactgccctcagtctcctgccttgggactgttagtgagaggagtgaaccctccctcatggaagctgcagtgttttggggtctccttgtgagaacagctcagtcttgtcctgaactaacccattagagtgtgtgagggagcatttcactaccttcacttacacagggactccagcgggccactcattctgtgactcgttttcacctggcttcatttcaaaagaaacctgtctcaccactgtgagcagaaaaccccagcaccatctgttaaagctagagagtaagtgtaaaaataagctccaagaaaatggggcaatggacttgtgttctagcaggtcctgaggctggcttcccatgcagaggttgcctgcggaagtctgggggctgaaggcctgtctcttcctctttccgcagggatgttggggcaaattagcatcaaactgtgtcatccttcttgccactgtttaaagcttcatggtccttcagggggcattttacctgttaccatcgctgcgagacctgcccctgacattagacctacaagtgtgctgcacacccccaccaacagtcccaccagtggacacccaggacctggcctcatgaccctcatcagtctgacctctgacacaccatgtgtttcaccctttagctcctgtctcccgcaataggatgtgagctccctgagggcagggatttttgtcttactcattcctgtatccccagggcctagaacagagtctagcacatggcaagggttcagtatttgttgagtgaaggtaggctgggtccaggaaccaccagttcacctcataagcctcctccacttgggaagcagcacgtaggtgacatgggctgtctctggagttgaatggcccaggtttgagcccaggagcccctgcttagtagctgtgtggcctggactgattacctaagctctctgtgccacagatcacgagagcacgcagctcagagcagttgtgaggatgcaggggaagcaccaggggcagtgcctggcacagacaagtgtataataaatgttagctttgaacagtcagtagaaggaagtcaaaatgacgacacacatccccttctctgaaggaggatgaaattctgggcatggtgccacttatgccaattaaacacatacccaagaacatcatagagtttttaaggacacagatgcatctaaactaacacatttaggagtattcagaagtagtgaactaggtgtatagttaaagttaaaaacataacattgagtgaaagaaggcaagaaacagcatgaggtttagagcatagtgccatttatacaaattaacacacagtaccaccatatatagtttaaggacacagacatgtctatagaaaattgatttagaagccggagtcagaagcagtgaactcggtccacatgtagggatagggttaaagctgaagagagccagagacagatgagacgcagagtggaacatcacttacgcaaatcacacacagcaccacggccagcatgcgattttgagggtacaaatacatctaagtgaacacatcagaacacatgttaagtgtgcttgagcagctgtccatggttgagagaaggaagttgggagacacgaagggagtaaaataaaacgagaaaggcttcatgtgagggaaggactgggaaggacttcacggcacactaaggacagggaaacatgagggactcaacgccatttactggagggttcaccctcttcccactctatatgccttcccagataatctcatcctctcctggggcttcagctgatggctccggagatattcccggggtctgagtctccctttagacttcactcctgcacttcagacgtagatggccagctgcctcccagatgacttgggcaacaagtccaagacggagtcttgctttgtcacccaggctggaatgcagtggcgagagctcggctcactgcaacctccacctcccgggttcaagcaattttcctgcctcagcagggattacaggtgcccaccactgcttcggctaatttttgttattttcagtagagacagagtttcactatgttggccaggctggtctcgaactgctgacctcgagatccatctgccttggcctcccaaagtgctgggattaaggcgtgaaccaccgtgcccggcctgggcaactgatattcatgtctgaagtgcatgcctagcacgcccgctaggatcagctgcccactgtccttggtgctgaactcatacccacagcgcttcccttttgtgctccgctgtccctggtgctgaacccacatccctagcacttcccttttgtgtcccgctgcctgctgttcttggtgctgaacacacaccttagtgcctcccttttgtgcccagctgcctgctgtccctagtgctgaacccatacccctagtgctccctctgtgtccagctgctcaatgcccttagtgttcaatctcaccccagaacttcctcatatgttccgctgtccaccggctttggtgctgaatgtttaaaccagcactggtaagacctggtggtttacacagaggtgaaggcactgatctggcagtgtggacactgcataggtggtgctaccagtgctgaggcagggcctgggcctatcctgctcagattgcctgcatgtttgtgatgaatgagtcatagtttcccacacacaatgagcttttttttttttttttttttgagacggagtctcgctctgtcgcccaggctggagtgcagtggtgcaatcttggctcactgcaagctcccactcccaggttcacgccattctcctgcctcagcctcccaagtagctgggactacaggcgcccgccaccatgcctggctaattttttgtatttttagtagagacggggtttcactgtgttagtcaggatggtctcgatctcctgacctcgtgatccgcccgcctctgcctcccaaagtgctgggattacaggcgtgagccaccgcgcccggccacaatgagcattttctctgagccagcccctgtgctaagtgctgtgtgcacctgacttccctgaactctttgcagtcccataaggtagtagctagtaggagaccatctcatggagcaggacactgaggctcgcagacgttaacaccccacagtggtggtgccagagtctgagcccaggcagtgtggctccggaacacctgcctcgcctgctgtgtggacactgcagcacatgcctgtgcggctcagaggacttgggctctgctggatgccacctccccttccctcctgctcccagttgggctctgggcttctgtccacctgcaggggttctgctgaccacctgcaggggttctgctgacccctagactcacttctgtttttgcttcatgatgtcctcagtgttgggaaggcaatttgtccatggcagaaacccgtagagccacttcagcatgcagtagcccaggctctggaggtcgctgcggcgggagggccctggggaaggaggagtaaaggtggcagctcaagtctggacgctccactcactggtgggtccaccccccttccttcccctctctctcactgactcaaccacacactcatacacccagccttccagccatatgggctgtctcctccgctcattcactttcatgagtaggcagaagctgactcattctctctctcactcaaccattctctcagccccttttaccaggtcaccctcatccactcctctttcattcatgcactcattcaatcaagcctcagcacccgtgtgccaggcccagctcacttctgaaaacccagaccaggatctcgtcgggtcccagcccgtgacagcctagtggggagacagctatagcgtgcgactacctgagtgacaaaggacacagaacacacgggagcccagaaggatgggtaccaaacccagcctcagtgggggagggcgggggagactctgacagtttatttttcttatgcttcctgagcataagacaacgcttaatttagacaacgctttgtgtaagcactcgacaagcactacttgtccgtgctggccttccaccacccgatgctggaggcaggggtgccatccctgtactgggggagctcagtctgatgggaggatgtggcaggcatgtggacggccatgatataaagggatgtgagaaagaggggctcaagaaatctgccctgggccctcttcctagtctgtacactttccctggatgatcccatcctctcccagggcttcggctgataacttctgagatactgcagagcctctgcccagatctccctcccacactccagatgtggtggccaaccacctcctcaacagcccctcctggatgactcctaggcaactcccatcttccaagtctacaacagatcctgaaccccaacctctggaactcaggctccccagtgcccagcctcccactatgcttagtgctgaaccgctaccccacccacctcccttgcggtcgggacgctgtctgtggttccaatccctgtcctggcgcccttagtgcctctcctgtctggccacctgctgtctctggctgtgaactcctagagctgcccttgtataagaagcatctctctgcggtcccaaacccatccctggcctcgtaccgcatcccttgtgcaggtccatgctaatgaactcaaggtccccctcgtgagggctcctgctgccttccacgtaggccacgtgtttgccacttgggcaatagcggaaggcgaagccatagcctgccaaagtcacctgtggacacagggaaaagccatacagattggaggttaggagcgtagaagtcagagatttccatcgtgggtgcaagtgacaacaaacattctaccaaagatggcatttttcacttacaaaactaaggcatgctcatagtaaaaatgatgtgaagtaaaaagaacccaaaccagccatccatatttcctcccagcccctaaaacccatcgcccagaaataaccactagtaacagtttcgtatgcatcattccaaaatttttttttttttttaaataaccaggtaaacatatgtggatggggagggggctcttgttttccacagaggcctcacaccagacctcctgttgggcaccggcactttacactttaatagtggttctgggcattaactctggggccagatggcctgggttcaaatgccaactcagcccgctggtggcggtacaaccttgggcaagctataccagttctctctgctatgatttctccatttgtaaaatgatgataataatagtccccacctcaaagggttcttataaggcttaactgagtttaaaacaaaagttaaatgctttctgcctgatacataaagttaaccaaatcttctttcaaaaatatctacttatttattttgagatggggtttcactctgtcacccaggctggagtgcagtggcgcgatcacggctcactgcagcctcctaggctccagtgatcctcccacctcagcctcccgagtagctgggactacaggcatgcaccaccatgcccagccgattttttgtaaagatggggttttgccctgttgcccaggctggtcttgaacccctgggttcaagtgatcctcctgccttggccactgtgcccagtccatgtcttcttttcaatggctgcatcttattccaccatatggatagtggacaactgttggttttgtctatgtaagacctatatacacttccccggctccctgtttttctgtttacagtttgtggtgttcattaaaaaaataattttttttttttaagttttgagacagggtctcactgggtcacgcaggttggagtgcagtggtatgatcatggctcactgcagtctccatctcctgggctcaggtgatccttctacctcagcctcctgagtagctggaaccacatgtgtatgccactacacctggataggttattattttttattttgtacagatgaggttccctatgtttcccaggctggtctcgaactcctgggctcaagcgatccgatccttccactttggcctcctaaactgctggaattacaggtgtgagccactgggcctggccatgatggtcatttttatgtggcaacttgactgggccatggggtgcccagacatttggccaaaccctattctgggagtgtctatgagggtgttctggatgagatgaacattggggtttgtagactgagcaaggcagattattctccttaatgtgggtgggtctcattcaatcaactcaagatgtgaatagaataaaaagctaagtaaccagaagctcctcctccctgactgcttgagctagaacattggtcttttcctgcctttggacttgaactgaaacaacccctcttcttgggtctcaggcctgctggcctttggattggaacttacatcattggctctcctaggtctccagattgcaaactgaagaatctcaggactgcttagcttccattatcaataagccaattccttataataaatctctacacacacacacacacgcacacacacacacaccctgccagttctgtttctctgaagattcctaatgcttagttccaggattttcatctgggattgcttttccccagttctcagtccacgcagttcaggtctgtttctgccagggctgctaagctttggggatttaagcctaatttgctggtggcaattttgtcaccatgaggaataagtctgcctgacaacgagcagtgcagaagcatgaggagtccagagatgggagagccggcttcccaatgacagggtttgagctcctggatcctgccgtgcccgagacagtgcagtcctggattgctccattctgtggactaatacattgcacacagtcccttttggtttttggcttaaggcatgtaaagttgggtttctgtcatttgtaattgtaagagcaattagaagttactttaaaatactatttaatcagtatcccgcttaaggtgtttcccatttcactattacaatcagtgttgccaggaacatcttgtacacttatctttgaacaatcctatgaatatataggtaggacaccttcctaagacaggaacttgtggatcaaaaaacaggtgcattttggccgggcacggtggctcaggcctgtaatcccagcaccttgggaggcaaaggcgggcggatcacctgaggtcaggagttcgaggccagcctgaccaacatggagaaaccccatctctactaaaaatacaaaattagctaggcgtagtggcgcatgcctgtaatcccagctactcaggaggctgacagagaatcgcttgaacccaggaggtggaggttgtgatgagccgagatcgtgccattgcactccagcctgggcaacaagagtgaaactccatctcaaaacaaaatcaaagacaaaaaacaggtgcatttaaaactgtgactgttattgccttccaaaagggtttcccaattcatgcttccaacagtatatgaagaattcctacttccttatatccttatcagcaatgaatattattatcatgcttaattttgttcaaagggtgaaaatagtatcttgttttaagttacatctctatagttactaaggaggttgaatatcttttcatattatttagctagcctgtggatttctttttttaagaattgcttttcttatcctttgtccattttcctactaagttgcttatcttatttatttgaaggagctctttatatatgatggacagcaatcctttgtctgtaataagcactatgaaataaatagagatttggagacagatgggaacctgagcccagagatcttccagagtgggcaggagctggctcttacctgactctggtcctctggatccacaaagatattttcagctgtcacatttccatgaacatactcattctcatggaggaactccagggcatccagctgggggaagaagcaagtcagtgtctgcatgagcagtacgactaacacagagaggctatggtgcagaccaggagggagccccactattaaggcctggggttgtccgacactgtgactgggggttaaacctgactaaatccggggtagcatgaggagcccgctgtgacagcacattgagcacgcctctaatcaggctctcaggaagctcatcaattgagctaaagcgtggcttcctatctactcctgtatttctctcttagctgatgacaaactcagcagagggaaaaggggttaatgtctctctgcaaaaatgactcagcacctgtggatatcaaagagctcttctcacctgtcctagagagcagaaataaatcttgttaagcaatttatatcttgatctccagctccagctgtccctatgagctccagactctttttttgctgtgtgtatatatatatttttgagacagggtcttactcctgttgcccaggctggagtgcagtggtacaatcactgctcactgtagccttgatttcccaagctcaggtgatcctcccacctcagcctcacaagtagctgggactacaggtgggtgccaccacacccggctaattttttgtatttttattagagagggcattttgccatgttgcccaggctggtcttgaactcctgagctcaagtgatccacctgcctcgtcctcccaaagtgctgggattactggcatgagctgctgcgcccggccaattctttgattgtgtctgctgcctgagtgtcagctacattctgatcatatccccaaccctctttgaccccagggctctactgtccaccaaattctgctcgttctcctcctatagactctccacccccggggcccgggaccctcctcagccttgtcctctcccacatggaccctcactcagattcttctccccattccagtccctccccatatggcccctgagggcctttctgtacccagagctgaccccgccctcccctaatcccagcactcttgtggctctccagtgccctcaagacagatcccagcccctcagcctgctgtgcgaggccccgtgtgatgtggtcaccgctgacctctccagaccaactccatctcttccgcactgcagtgccatactgcagatactgaacataaagaccttaggactcagcatgtcgctcccttggtacgtccatccctccagcgatgcaaactgggccctcttactctcaatcacagcaggggccgcttctattcagagcacttgtcatagtttgtgcaactgtttgattcactattggcccctcccactagactgtgagctctaagacacagaaaccatgtttatgctgctccctgctctgcacccagccccggggacagcgtctggcacccagcaagtgcctgatgaatatttaatggggatgaatgaatgaactaatgaacaaatgccatatgctctcccttccacacaagccttgccccagctgtatccttggccggaccatcctctcctcatctatcctcttcctcttccacccagcactttgctatttccactcatcctgagagtcttggcttagaaacaccctccaccaggaagcctaatctaagccttcagtttgaggccggggctccttcctccaatgctcatggccccccaagggccctccacaggactgaccacccatcatctcggctctaaccgcctgccatggcagtcagtgagccagcccccagtgtgcagcggaggggggtgggggccggaagtgtcaatgactaaagtgcctgctaaactaggatgtgatgtgccctccctgacgcggcagctgagcaacttctgggtacgcaccagccggcaggccacctgcagcacagacctctctgacagcacatgctttgggctgacatccagggccgactgaaggctcctccccaggctgggtaacaccaagaacctggaagacacaagcaccccaggaggtgggagatgaacaggggagagaggagtaccggccgccaaggatggactgttgcgtgggctgcaaggtcctggtcccaggtgagatcaaaggttctgactggctgggcagcaaactaggtcaaaactacgagaaggcaggaagcaaagacctggcccacggcttcggggtcccagccatgcctggagtcacaacaggaagaagaggaaagaggccggtgaggcaagcagtgagcagagcagctcacctgtatttgtcctggtgaacaccgaaacccatgcaggtagggatggccagcagtggggtcgagtacagcttcttccacttgttgactgcggaaagcaggggcttgaggttagaacccacccagtcccaagcccatggcagtaagagctagttctcagagaagaagcacagagtgcccagaccgcctccaagtctccttgttggaggtgacaacattgtgggtgggtgatggtgggaaggggctggtgacagggcaggcatgggtgaccatgaatgtctgtgatccaggtctgcaggtgatggggtgatcatggtggctctggaggaagcatatacaagtctggagtgcagagatgggataatgacagggttacttccgaattcacacatagagctaacaagatcaacacgtgtctaacctagccatggcatcaccggaatgtgcctctgcctgtcttccagatctcagtggggtggaccagaaccaatggcgagctgatgctagtttaacagctggctatccagggaaggcagtcctgatgggtagcatttgctaatttcttttttctttttttttgagacgaagttttgctctgtcgccctggatggaatacaatggcgcgatcttggctcactgcaacctccgcttcctgattttaagcaattctcctgcctcagccttccatgtagctgggattgcaggcttctgccaccaggcccagctaatttttttttattttttattttttttgagatggagtcttcgtctgtcaccaggctggagagcagtggcgtgatctcggctcactgcaacctccacctcccaggttcaagtgattctcctgcctcagcctcccgagtagctgggatcacaggcacgtgccaccacatccaactaatttttgtatttttagtagagatggagtttcaccatgttggccaggatggtctcaatctcctgacctcatgatccgcccgcctcggcctcccaaagtgctgagattacaggcatcagccaccacgcccggccttttttttttgtattttcaatagagatgggttttgccatgttggccaggctggtctcgaactcctgacctcaggtgatccaccggcctccgcctccaaaagtgtgggaattacaggcatgagccaccgcgcccgactgcatttgctaatttctgcagtgtaaataaatactcctgctatggccaactccaagctaccaacatgacatgactggaggtggggtgggagagatatacaggggaggccatcatgcagcattctcaccacacagagacaatagtgcacacaacctcactggcagagatcacaggacatgtaggaaataattaggaagtgatgaatttctgagggttcattacctttgttttgaatataatttatttgtaaaattatgtaacttattttatatattttttgagactaagtctcactctatcgcccagactggagtgcagtggcatgatctcggctcactgcaacctccaccttccaggttcgagtgattctcccacctcagcctcccatgtagctgagattacaggcacacgccaccacgcctggctaatttttgtatttttagtagagatggggtttcaccatgttggccaggctactcttgaactcctgacctcaggtgatctacccacctcagcctgccaaagtgctaagactacaggcatgagccaccacgcctggcctatataatttaattgctagtactggctgtctgtaacaaccagcttgccatcttcctaaaaatttatttttatttttattttttttggagacagggtctggctctgttgctcaggctggagtgcagtggcacaatcacagctcactgcaatctctgtctcccgggctcaagcaattctctcagctcagcctcttgagtagctgggatcacaggtgcatgccattacacccggctaatttttgtattttcagtagagataaggttttgccacattgcccaggatggtctcaaactcctggcctcaagtgatctgcccacctcagcctcccaaagtgctgggagtataggcgtcaacccacgcccagcctgaaaatttaatacttggcttccaagagctggtgtgagccagtcacaacacacactgaggcctgaggggtcacaggagtcaggttatggacacagatgggagcaaacctgggcctttaatctaagcccacccttctcatgcctgcaggtagaagtcaagtgctgtgaccaagttggcgcccccctcactctcccctccttgcccagttccctgtcaggtaccttgcagaggcttggcggcccgctggaagaagttctgctcattgaacaagcgcccatccttggcatcctggtgggggacaggaggggcagaaggctgtcacactgaagtctcagataagggcccccagtccccactggcaatttgttactccctcaatgaccaggctcctcatcaagtccccacatcggagccaaattcctcaggtactgcacacaaacacacatcagagactgcgagctaccttgctgtacccaggttccttttctttctcttatggtaagagccacagtgttccctagaatgtagccttcagcataaaaactacgtttcccagcttcctttgcagtgaggactgaccacatgaccaagttctggccaatgaggatgtgagcagaagaaatgtgggcaacttccaggttatgcccttagtgggctgggacaggctctacctttcctcttctgttccagctggctgcaacgcagatgtgatggtggaagctgaagcagccactacggcccaggagatgcaggttatgcgttgaaaatgttggtgcaaaaagaaggaaacagggccccttgtttataaaaccatcctatcagctctggaaaactgcccctgacttttaaatgaaaaagcaataaaacatcatcttgcttaagccaccattaatattaggtatttgttaaaataacactaaatggccaggtgtggtggcttaggcctgtaatcccagcactttgggaggctgaggcaggtggatcacttgaggttaggagttctagactagcctcgccaacatggtgaaaccctgcctctactaaaaatacgaaaattagccaggcatggtggtgcgtgcctgtaatcccagctactcgggaggctgaggcaggagaattgcttgaacctgggaggcggaggttgcagtgagccaagactgcacctccagcctgggtgacagagtgagattttgtagcaaaaaaaaaaaaaaaagcaccaaatattttaattaaacacaactcatgcagctgagttcttaagagtatagagtcaaacagatctaggttcaaaccccagctctgccattcattcattcattcttcctacaaagcctccattatatgctgagtattattctgggcattggggatatagctgtgaacaaagcaacctgcgtgctgggtgcacctgggcaagtgactgagtctccatttcctcatctgttaaataggaacatggaagccatcccataggcttgctgaaataattcaatgacatagtaaacacacatacacacacacacacgcacacacaaaaccccaaagaaaaccaaaaggctgggtgtgatggctcatgcctataatcccagcactttaggaggtgaaggtgggagcccaggagttccagaccaacctgggcaacacaggaagaccccatctctaccagaaaaaaaaaaaaaaaaaaaaaaaaaaaagctggacgtggtggtgcatgcctgtggtcccagctacttgggaggctaaagtggaaggatcacttgaacctaggaggctgtggctgcagtgagccttgattgcaccgctgcactccagcctgggtgacagagagagatcctgtctcaaacaaaaatccaaaagaattaaatgacataatgcttgtgacactcagcccagggactgtcacataataggttctcaataagcaggtgctgctactggtcattagtgagcctggctccctgccccatcttctcctcttcttgtccttttctctttttgcgtcctggagtcctccccacgatgctggcgaagcccatagtgactgacgcgagcgacgtgggcacagccatgcaggccctgagcaatctcatgtggggtattcatgcctgccccactcccccaagggggcagctccttcagggcaggaattgggtctgacccatctctgcagatgtccccagcactcagttcacaggaggttgcaggaaaggcttggtgaataaatgaataaatggatggatgaacaccactgggcattcagcccctgacctttcgaatgcttcagaacagagctgccttcccagtggatggggagggtgaatgtcttctggttggcccagtgccctgtgctcccctcccagcccacccctcttcccgatgggactgggacatgacatggctcccgccagactgggagcctctccagggctgggcctggggccaactcatcatcaccaagttttgagcctcaggaaatgttgatgaggtcagatgcacgaacagagagcaaggctgtatttctaggatgatgagcataattacagtagtaataacaggaacagctcaggttgatggggtgcctactgtgccagacacacctgaaccatgcagagaagtgttaaatgggacacggtagctgccctactgggaggattcaatgaagcagtgcttatgaaacacagcccggctcaggcaatgccaggctctcaaagcaggtgctacccaccactagtgagcccggctccacagcccacgctctgacccactctcatggcctccacctagggcggagggagggcaactgacccagctgtccctggttttctggggtgtgagacaattctgataaacaaaaagaaaataagagtcacctgtaatcccagcacccagggatgatggcggggctatgaaccaccacgatgcccttctgttaggcacctcctctgtgtggaaggcgtgattcaccctcgtggccactctccctttctctatttgtttccttttagccccaacctcgagtgcacatgtcctgtctgctgagactcatgctcggcacccgatgtgtgatttcactgaatcctcagcacagggaccccatctgctgggttctcttttggaccccacacccagcacggtgatacacagtaggtgctcgatacgagcacgctgcgaggccggtggtagggggcagatgggccacaccctgtgggtattagtggctccatttcacagatgaggaaactgagctctgagggggatgggcttgcccaggtcacacagcagggaagcatcagagccagacttgggtggatccaactgtgggtttccaacaccctgggatgatggagaactgggcgcctgccccgcccacggtcttaatactccttgcaggtggggaccctggcccccggccgagctctcccagctgacagacgggctcagaagtcaaggatgtgtttgtgaaagtccctcccctccaagctgccccccacctgcagggtcacttaccagtttgagtgagaacttttgcttctgtggtcctgagtcacaggtgagggtggaggtgggtgcagctgtgggggaacaaacaagggagtgaggttataaccacgcggaaggtcagggtcatcatccccaaacttcccagcaatgagaagcggctctggtgccctggttccaacaaggtcaagcgcactcttggctctcacgacttgctgcttcctagttttaaataagcttcttcttcctctttctctctgtcactatccagccatgcaggaagggctaatgcagcaggcctgagacggctctcctggcaaggtctgggaccctggattccgggagggctcccagaatcccctaagtgagtggggctcgctgagcctaaactgcttgtgcaatcactgtggtttctgtgcaacacctgctttcctctggggaacctgggatgcggatacatgtcagacagagggggccacatgactactccccaataacagccccgagcactgagcctctgaggaacttcctggtggacagttcccatgtactgtcacagcctgtggctgggcaattaggtgcgtcctaggcagagtgacttcatccaaggccacatcccagggtgacccaggtccagtgactgattgaggtggacataaaggcccagcctctcctggcccaacacggacgcacgctgaaggaccacttttgctccagagccctgcagggtcggctgaggccatcactgggctgcatcgcagcccacctcctgctccttaccccctccttgggttctgatccctgaggcagctccccataagcaccctgcatgcttgtcccccgacagagcctgctccagtagcccttactgttcatttacagacctcaccacgtctctggccctgtgctaagtgtgggcttcacatgcatggtcccatctgacagatgagaagaggagagaggccaagaaacgccaggctgacccagggttcaaatcccagctcctccatctgctctctgtatgactttgggcctccatttgcatgtctgtaagatgggagcagtaaggcctaccccgagactggctgcaaggactcaacaggctggcaggagtaagagcagcaccagcgatgtgtgcagcaagagtctgcatcccccttcacgcacactgctcagtgaacccactcagcccagagcccagcacggaccctggcacatcaggattgctccacaggtggtggccttaaaatatccccataacaccagggctccccagccggggagtggcagagctggctcaacctgggtctagctaatcccaaagcccatgagttgagctcttgtcgcccgcacacctgactcacgctggtgtccctccttcctctgttctcatcgttcccactctcccttcatcatcgaggctggtatcgtctaagacactgagctgagggatggggggtgacaaagtcacccagaagccatccttgccctcaagaagctccagctggaacagggttgggagccagctctacacgttcaaggccaagggtgctctgagcccaggggaagagagggagacgtatgcaggacccgcatctcggggaaagaaaaatcctttccagctgtggggagagcactggggggatcatgctggagcaggctgtgacatcatgaccaagcatccgcccagctctggaacccaggcatagtaacagtgcctgtctctcagaggcaccatgaggttaatgacaatgcgtacgtgcccggtactcagaggcaagcaggaaaagctggcaatttgatacaattttataatctgctttgcagattataaaaagcttttctctttcacttttctaactggccctgcagccaacagcctggaaagctagctgggcaattttcattgtagagggagccaagggaggccagaagggaaaaggggcttggccaagggccccagcagagacaggccacaagcccagggctctagactctgtgatctagggtggcagatccaggtttctgcttgccggaaacctgacaaatggaaagtctctacatgtgccaaatgaagaccagggcgtggcatgcaggcaggtgagcacctccccttcccaaaggtcagctggtcctgaacttggagcaggagcactgttctgggacccatcctgaccctaacaccagaaagcacatatacggcagtggccgttttcccggcatcactctactcatttcactctcctgactgcagccctgtgagggcagtagcattaccatctcccctctgcagatgaagaaactgaggcacagggtcatgctgtcattcgaaaggtcaagcgacaagcggcaagcagaggcagcccagcccaccactgagctccagggtgccccatgccttccacctccccaggccctgctggggaccctgactgacttctcccctccggcctccagaaggaatcagcagagccaacacctaaacttcgtacccagtgattttggacttctggcctccagagctgtaggagaataagcatgtgctgtgttaaaccactcactgtggtaacttgttacagcggccacaggaaactaacacaagccccacctttcatctgcaaaggcagaagctgcagagggcagcgtgggcccgaccctgagctgctgctcacgggcagctctcccaagtgcaccgcagtgagcagccgcacggattcatgtgactgatgacggatggtggttctcccctatagctcagcgaggcccgggatatatgacattatagttcagtactggacagagacacaagagttaataaaatgcttagagcatggcgcagagagtggggtaaagtgtccactgctcgaataaccataacgattcagcttgttcttgttgttttactgttattgctttaaattacgggacatacaactccaccatctcttcttgactggtgcaaactggcagaagaaaagggcgatttgctctggggcgatgtcacccaatggtggtgtgtccccaaatgcaagctccgcatcagcagggccttcaccagccccgctctccctgcactgtctgtgctggcaccgcggccagacacatgaaatggtaggtgctgcttaaggatccactgagcaaccgggcacagtgctcacgcctataatcccaacactttgggaggcagaggcaggaggatggcttgaggccaagagtttgagaccagcctggccaacatagtgagatcgtctctactttaaaaaataaataaataaagggactgctgaaggaatggatgactcacacaggctgggcactggggtttgctatttttatcaaacaacctgagtcatataagggaaaaccaaaaccacattggcccagagtagctcctcctgtgcttccactgtgggtttctgggggaggtcaagcgtggtttcttctctcaggagctcctggctctgtgtgttttcctctccttctccctcttccttccccgccctcctgccctctccccaccctgctctctcacctcaatctctttcttactgttggttttcatccttctccctttctcctccctctgtgctcctcggcccctcattccttctcatcatgatcccttctcgctctttctccctgccctctccttctcctttctctccctttcttgggagaagccagagtgcctgcgttcaaatcccagctctactacttccaggctgtgtgcccttgggcaagtagcttcctctctctgtaccccagttgcaggatggggtaatatgggtgcctatctcacagtgtggctggcagcattacatgggtaagacacagagagttcccaaagtgtctggcatgggatcctgcctgtaatcccagcactttaggaggctgaggcgggaggatcgcttgagcccaggagtttgggaccagcctgggcaacacagtgagactgtctctatttaaaaaaaattaaaaaattagcctggcgtggtggcgcctgcctgtagtccaagctactcgggaggctgaggggggagaatcacttgagcctgggaggttgaggctgcagtgagccgtgattgcacaaccgcactccagcctgggtgatggagcgagactccatctcttaaaaataaaagtgctggcacaggtgagtgctccctaggtgttagccacggccctctttctcttgctcctgcttggtcttggtcacactctttcccctctccctcacctttcctggccctgcctatctgtccctctgttattaacactgcctacctctgcctgggaaggaccctgtacagttttccaagtgcttggcctccatctcctatcatcatttgagccaacagccccaggagacaggggacaaggcgtcatctcacttttccagtggaggacatcaaggcacagagtgcctgggctgtttgctggggctccctcagtgtgtcggagccaagtcaggactcagattcggggctgtctgaaacaccagctgtcctgcccacctgcccagacttcaaggcagggatggccaacggaaggctcaaaattgtctacgtgcctgtctggccagcaggcacttccaattcaaagatttcctattgaaatctaggtttcaagcttttcctggaaaacttggaagattctggagcccagagcctaataattcacatctctgggatccatgttcctcatgtataaaatggggatagggatagtactgacatcctaaggctgcggtgagaatttagcaaacctctgcccatcaaataacttgtaagcaaatattcatggcagcgttactcataacagcccaaagcggaaactacccaaacgcccatcagctgctaagtggctaagccacatggggtgttcccatacagcagaatatcacgcagccataaaaggagtgcggcagtgacgcgccacagcatggatgcaccttgagcacacgccgctgggtgagggatgccagacacaagaggccacacagcgcaggactccacttctgtgaacacccagaaggggcaaatccacggagggagaaaggcggttagtggctgccagtggactgggggaagaatcagagtgatggctcagaactactgggtttctttttggggtgacagaaacgtcctggaattagatagtgacgatggttgcataacactctgaatatcctgaaggccactcagttgcaccctttaaaagaatgaattttcgtggtggctcatgcctgtaatcccagcactttgggaggctgaggtaggtggatcacttgaggtcagctgttcgagaccagcctggccaacatggtaacaccctgtctctactaaaaatacaaaaaataaaaataaaaaaataaaaaaatttagcccggtgtggtggcatgcgcttgtaatctcagctacttgagaggctgaggcaggagaatcgcttgaacctaggaggtggaggttgttaaaagccgagatcgtgccactgcactccagcctgggtgacagagcaagactctctctcaaaaaaataaaaaataataaataataataataaaagaataactttttgtttgacatggagtctcactgaataatttttttttttgagacggagtctcgctctgtcacccaggatggagtgcagtggtgcaacctcggctcactgcaagctctgcctcccgggttcacgccattctcctgcctcagcctcccaagtagctgggactacaggtgccagccaccacacccggctaattttttgtatttttagtagagacagggtttcaccgcgttagccaggatggtctcgatctcctgacctcgtgatccgcctgtctcggcctcccaaagtgctgggattacaggcgtgagccaccgcgcctggccaataaaagaataacttttatgtgagttttatctcaattaaaaagttccaaaaagaaaagaaaggaaaagaaaaacccatgtaaagtgcttagaacaggcctggccttgcagaagcactcaatatttattacagttaatactaatactactgccataattattttcctcattgtaacagagtctgagcttttcagccttgtgcctccctcctccccttccatcccacacctgggtgagcggatgagcaagcttgggtgctccctcctttggggtgtgcatccacgagactcaaaccatgcatggtgttggcccctgtgcagaaaccctgagcccagccccacccccaagcacgatgaaacacctgaccagtctcctttcctcactctcaaggcatctcagatctgtgtgggaggcctgcctgctctccacagagacccctattatgtaagcaataaacctctcacatcctcttggtgtgtgtgtgacatcatcagtctcgatgtttgaaccaaattttacgtggggatccatcctctctctgcacactggccagaacaaccatccttaacatgcagcccctgggcctgcactcccacgtgacaatagcaggtagcaggtggggtgaggaggggcacacttcacacagggcacatgccaactggccgcagtccccgccactcccaactgccttactccagcctgctgcactcattcccactattgcccggccctgcaggtgggtaggtatagagtccaaggtctaagagaaagttgcctagcgacaggtctgcagctagggatgtggcttccattcccattctcagaacggggtcccctcccactgtcctggtgctgagacgacccagtccctggccgcccatggacagagtgtaccttcatagagaatgccctggttgtccctggtctggaaggacttcagcttccactgtcgcccactcttgtctgtcagcactgtccctgtgggcaaagcttcaagtgaggtggtcactcggctccgcttcagcgtctgagggctctgcctggtcttctgagggctacagctggtcttctgagggctacccctggtcacctgagggctcttcctggtcttctgagggctgcttttgggggttgggggtctgctcccggagcctgcaggaggatgtaagaataaagtaaaagcaccatccaggagagaaaagttagatggggagtgaaacagcacgcaaaatactgttcctttacaaattcgttcattcaacaaacatttcctgggaccttctatgagtcaggcctttgtgtgatgatgttggggcaccagataggagtcggacctgcatccttccctcaggagtgcccagtttggtgggcaagtctgctctagacacagctagtcagatgcgggtctgagacagggcagtacagacagatattagggcccaaaagagaaagagatcctgcctggagaagtcagggtaggcttcctggaggaagggatgttagagttggatcttgttggatgaggagaagtttgccagggaataaaggacattctagacatttacccaaaaacatcctgaaaaaggactcagtcctgagatagaaaagggccaaaaaatttgttagaccaaagccctgccctagaagggctcctagcctggcaagagaatggggtgggtgtggtgggagacagacttggacacaggaaaagacatcgcttactctgttcctcccacccaccatcccctaaaggcaagtaatggcaagaggcctctgggcccagaggataatgaggagcaaaggggacgcctcacactgccactgtggctgtggcttcagatccaggggctcagtgaacaggagaaggaacatagtcctcaggcctcccgtgtcctgggcactggctgggcagagggtatatacactaattgtgctgggtccctacctgcaaagggcccccagcccagaaagtgaggccgaaagggatgtggagcctagactgacatgcgctccaatgaaggctgcagcaggcacgggggggcgccaaagaggctggaaagaggctctggcggacgatgaggaggtctggatgcgagcctatggcactcaagagaagcttcctagagaccagtatcggctgagtggcagtacacaaggccaagaacgaaggtgagagtgccctgggctgagggaacaggcttagcaaagaccaaggttaatccccaaaagtgttttctgggcaaagactgtgttgagggctaaagcaggaaccaggccacacagataccagactgaagagcttggtctgagggcaccaggaacagtaggggtctgtgtgcagggaggggccggggcagctctaggtgctgaaagacccatctggggccatatagaggcagactggagggggagatgggaggctggggaagctgctggagtcagagtccaggcagggatggatgatgtttgagccggggctgtggcagttttgtcccaaagatcatcagatgacctaactttgctccacttaagagtcaggccagatagaccttaactcttacctttggatctctcagaggaactcagagtatcttcagactcagaactgtcaccatctgagaagagggataatcggggagaggtgacggtgctggaccatttcactttcttaggagaggtttcaaaactggagttcagccctctctttgagcctaaagaaaggcagacaaaatgcagactggagttacaaaggcccctctgcaggcaccattggactgggagccctgaggttatactcagctatgctgttctctttggccctcaacaccaattcttgcttcttctattatgtaaatatatgagcaaactgttccttttagttgttctctccttcttaggtctttgcctctcttgtatcttccagcactttgccactctgtgtcctttccacataatgtctttatatgtatgtatatttgagatggagtctcactctgttgcccaggctggagtgcagtggtgcaatcttggctcactgcaacctctgcctcctgggttcaagcaattctcctgcctcagcctcccaagtagctaggattacaggcatgcaccaacatgcctgtaatgttgctaatttttatagttttagtagagatggggtttcaccatgttggccagactggttttgaactcctgacctcaagtgatcggccagcctcagccttccaaagtgctgggattacaggcatgagccaccatgcctggcctcttccatgtaatttcttaaaatctatcttccagttaactaattctcccagctatgtctagtctgctgtttaaaccacccaccgagtttctgattacaataattattttatatatatatacacacacacacacatatacacacatacaatgattgtgtgtatatatatacacacatacacatatatacatatatagacacacacatatacatatacacacatacaatcattagagtttttatttggttccttctcttatttgcctgtgcaactttaacctattccttcattatactttcaatttgttattttatttatttaaatgtattaagcatgctttgtaaacattctcatctattaattctaaagtctgtggtcttggcaggtccgattctgcagtttgttgtttctgctgactctccagctagcttatttcctggtgtctttgtaaatcaacagagactggtactcatgatccttggatgttgacctgtggtaattccctgatgtttgtctttaaaggatgttttccaagagaagatttgtttatatcaggcagggagtggtacccacatctcaccactttaagttaaatgttcagcttgcattttgggggaccacacagatcagtgtgaattctggccccaaactggtgagaacgtgaattcttggttaggaactctccaagaaggctgggcgtggtggctcatgcctgtaatcccagcactttgggaggccagggcgggtggatcgcctgaggtcaggagtttgaggccagcctgtccaacatggtgaaaccccgtccctactaaaaatataagaattagctgggtgtggtggcaggtgcctgtaaacccagctacttgagaagctgaggcaggagaatcgcttgaacacgggaggtggaggttgcagtgagccaagattacaccactgcactctagcctggatgacagagtgagactgtgtctcaaaacaaaaacaaaaacaaaaaacaaaaaacaaaaacaaaaaagggaattctcaaagaagacattcctcctttatttacccaccaccaaggcgacaaatgtctccaccaattttctgtggaacaattgcttttgttgtagttcacccactgaggagccccagatttgagaggaaatttccaattgcaactcctgtactgctaaggccctaagctttgtctcctgcaccccaataaaacacaggctcaaggccatcagcaaacagccccaggacaaataacacctatgtaacacttgcttagccctgtggtctctgttttcctgttgtttctcatctccatggactccccttactttcctaccacttagctctatattttaaaaggacattttaatgttttattccacatatttgggcacactgaacaataaggagtttttattatcatctggtctgccatattgctaaaaacaaatgtcctttctttttagttgacactgactaactcagccagcatggttggtccctgggctactggaatggcctcctaactggtttccatgcctcgaatccattttccacacagagaagccacagaaatctttccaaaatgcaaagcctattgtgttgcctacttggtagaagctcttccgcagctctccacgtcaccacagttaaaaccaaactccctcccatggtcctgcctgtcttcccccaggcagaaatgttcctcactcctccagcgtgtagttaaaaccaaactccctcccgtggtcctgcctgtcttcccccaggcggaaatgttcctcactcctccagtgtgtagttaaaaccaaactccctcccgtggtcctgcctgtcttcccccaggcggaaatgttcctcactcctccagtgtgtagttaaaaccaaactccctcccgtggtcctgcctgtcttcccccaggtggaaatgttcctcactcctccagtgtgtctggctcccctcgcctcacctctgctccccataccatgtcccagtggctggaacacatgtgccaactcccaccttgctcattctttttttttttttttttgagacggagttttgctcttgttgcccaggctggagtgcaatggcgcaatcttggctcaccgcaacctctcccttccgggttcaagcgattctcctgcctcagcctcccgagtagctgggattacaggcatgcaccaccacgcccagctaattttgtatttttagcagagacagggtttctccatgttgtttaggctggtctcaaaactcccgacctcaggtgatcaggctgcctcagcctcccaaagtgctgggattacatgcgtgagccactgtgcctggcccattcttcttcatccctagctcagctcaaactttacccacttagggagatcttccctgattccctgaaaagcatgttcccttatatatgttccagggtccattcagttcccctctgttatcatgcaacctgctgataatcatttattcaatgtctgttgtcttactgagagaccagaaaccagggctgtctcatttcttactataatcctcgggacaaatacagcacctcagcacatggcaggttacccatacatatttgccatctgatgactgatggagtgaataatgaactgggctctaggttagcattaggaaaggcaggggttgggttaagaactgactctggccgggtgcagtggctcatgcctgtaatcccaacactttgggaggccaggagtttaagaccagcctggccaacatggggaaagccggtctctactaaaaatacaaaaattagccaggtgtggtggtgcgcggctgtaataccagctactacggaggctgaggcaggaaaatcgcttgaacctgggaggcagaggttgcagtgagccgagatcgtgccactgcactctagcctgggcgacagagcaagactctgtcttaaaaaaacaaaggccgggcgcagtggctcacacctataatcccagcactttgggaggccgaggcgggtggatcatgaggtcaggagatcgagaccatcctggctaacacggtgaaaccccgcctctactaaaaatacaaaaaaatagctgggcgtggtggtgggcgcctgtagtcccagctactcgggaggctaaggcaggaggatggagagaacccgggaggtggagcttgcagtgagccaagatcgcgtcactgcactccagcctgggcgacagagcgagactccgtctcaaaaacaaaacaaaacaaaaaaaacactctgactctcaagttgggccaaggcaaacgctgttcacatttgcctggaactgtggagatgaagaagtcaacttgagacctcaaggcagtaagcatgggaacaaaagccatatgctaaggatggctcagtgcaaagacagaggagcctgggtcccttagggcatcatggggacaccatcccaatacgcactgtccccttttagtaagaaaaatattgctctacatacttgccagtgaaagaaaagaagaaataaacctaatcatttgtttaaacccttgtcatagcattttctgttatctgcagctaaacacactcccaaatgataaaatgaatgtcacttgactccccgccatgtatgctgactgccttctgcacaactgtccgatggataaaccttctttgatttaccaatatagtatctgggcttgggccttccagtgagcaagacctactactgatatttaattaattcattcaaccagtcagtaagatttctcagcacccaataccatgccaggcacagacccaggtgctgtgcaaacagcaggttacaaaaccacaatcaacacaggttacagaaacacaaaaagtttctgtccttatggagcttacagaagaagcaatccaagcaaaataatgtatttaatagggttgagacaagtaccaaaaagaaatacacagcaaggaagggggacaggatcattgcatagagggaagatgcaactttaattagtagtggtagggaaagtgtctctgagaaagtaacaattgaataaatatctgaaggcatggctgggcgcagtggctcatgactgtaatcccaacactttggggggctgaggcaggtagatcacttgaggccaggagttcaagaccagcctggccaacgtggtgaaaccccatctctactgaaaatataaaaatcagccgggcatggtggtacatacctgtaatcccaactactcgggagactgaggcacaagaatcacttgaactcgggaggcggagattgcagtgagctgagattggggccactgcactccagcctgggtgacagagcgagactgtttaaaaaaaaacaaagctgggcatggtggctcacgtctgtaatgccagtactttgggaggccgaggcgggtggatcatttgaggtcaggaatttgagaccagccggccaacatggtgaaaccctgtctctactaaaaatacaaaaaatcaactgggcttggtggcaggcgcctgtaatcccagctatttgggaggctgaggcaggagaattgcttgaacctgggagacggaggttgcagtgagccgagatgttgcagtgagccaagattgcgccactgcaccccagcctgggcgaaagagcaagactcagtctcaaaaacaaaaacaactaaaaacaaaacctgaaggcagtgaaagagtggggcatgcaggcccataagggaagaggcgtccaggagggagcggcaagcgcacaggctgaggcccaggcgtgctgaggtgtggaggggcagccaggaggccagtgtggctggaatagcaggagggtcgggaggtggggtctgaggggaaatggggacctggtcccttcacctcacttggggaagtatgagcagaggaatgatgggctctgactgtattcacaggatctctctggtggctgcgtgaagacgactacagggacaagagaggggagcagagggcaagaaggcttctgcataagagaggtgaggaccagggatgtgggaggtgcggagaaggaagtgggctgatactgcactgattgtaaagagggagccaacaagatttgctgaaggggtgggtgtgtcacggggtgcgagacaaagagaactcaaggatgatccccagggtccggcctgggaaactggatgaatggagtgctattcatggcaatggggaagtctagggcaggcggcaggaacaccaggagctcaggtgaaggcatgttcagactaagatgtgaccaggacatccaacacaggctgagcatcccaaatccggaaatctgaaatgcaaaatgctccaaaatctgaaactttgagtgtcaacaggatgctcaagggaaatttcactggactactgtggatttcagattttttttttttgacatcgagtctcactctgttgcccaagctgcagtgcaatggtgcaatctcggctcactgcgacctccgcctcctgggttcaagcaattctcctgcctcagactcccaagtaggtgggattacaggcatgcgccactatgcccagctaatttttgtatttttagtagagatgagatttcaggatgttggccaggctggtcttgaactcctgacctcaagtgctctgcctgcctcagcctcccaaagtgctaggattacaggcatgagccactgtgcccagccagatttcagatttttgaatcaggatgctcaaccagtaagtataatgcaaatatcccaaaatctgaaaaaatccaaaatcagaatacttccagtcctcatcatttcggataagggatactcaacctgcaggtgccaagctggcaggctgcacatatatctcctccaagcaggggagtccaggctggctggagatagaaatgaaggagatgttaacatggagacagtgttcaaagccatgaggccaataagaggccaagagactgatggtagacagaggggtccagtcctgaggcctgggcttctccagtgtcaggacagggtcagacaggctgcaaaggcatcctccctccgcagacacacacgtgtatgcaccttattcccaccgcagaaacaggctcaatgctctggttcttaccttggaaggatgacacatgtggattgacaaaggtctgggaccctacatgctcctctacaggcaaagaatttccacagtaggggcagaatttgaatgccgcttggatacttttgccacagtctggacagaaggagatcatgctacaaaacagaatgaacaaacacaaagtgaaacgggccagctgaaggtcagtggaagtattgttgaactgctcttaatcacagggtgagtggcaggaggcacaaccagggtcttcaactgtttgtgatgttcacttcttaaaacatgcaatgggaatgggagtgacagtcaatgttccccaaatatcaatatgctcccctatacttcccaggttcccttgcagcaaggtagaggccacatgactaattctggccaatggggtgtgagtagagtcatctcatggccgaggcagttaggagtcagaatacctcctctgcctccccctccacctgcagggatggccctggaggccatggctcccaactgacatagcaagatgaaggagggctgcctggtccacactggaacctcatgatcaacaaatacacttctgctgtattgagccaccaagatttcagggtttatttgtcatggcagcacagcctattctatcctgactaatttagtagaatgatgagtgttcactaaattactctctatgctttgcatctctctgagctaattcctgatactttttaaaagtccaaattacatactgagactatgacaaatgaggatatagaagagttttaagccagttaagtgaagaagggaaattaacaaggatgaagtacaacaggcagtttgtattgcccttcattatggcagtgctatttgtaacgagcatctaacaaagagcaatacgccgggtgcggtggctcaagcctgtaatcccagcgctttgggaggccatcacaggcagatcacctgaggttaggagtttgagaccagtctgtccaacatggtgaaaccctgtctatactaaaaatacaaaaaaaaattagctaggtgtggtggcatgcacctgtaatcccagctactcaggaggctgaggcaggaaagttgcttgaacccgggaggtggaggttgcagtgaaccaagatcatgccattgcactccagcctggacaagaagagtgaaaactctgtctcaaacaaacaaaacaaacagcagcaacaaaaaaaggccatttatttgttcttatagtctcaggcttactgtacattagcaattaaaagtgaaactattggccgggcacggtggctcgtgcctgtaatcccagcactttggaaggtcgaggtgggcggatcacctgaggtcaggagtccaagaccaacctgaccaacatggagaaaccccgtctctactaaaaatataaaattagccaggcgtggtggtgcacgcctgtaatcccagctactcgggaggctgaggcaggagaatcacttgaacccgggaggcagaggttgtggtgagccgagatctcaccatcacactccagcctgggtaacaagagtgaaactctgcctcaaaaaaaaaaaaaaaaaaaaaaaaaagtgaaactattgaaatagaagttaatataaacatgggcttgtgatttaatttcaccttgaaagagaatattcatttttaaatttttttagagatagggtctcactctgtcaccagggaggaatgcagtggcataatcatggctcactgcagcctcaaactcctgggctcaagcaatcttcccaggtagctggaactataggtatgtgccaccacaactgactaattttttaagttttttttttagagacggggtctcactatgttgcccaggctggtctggaactcctggcctccagcaatcctccggcctcagcctcccaaactgctgggattgtaggcatgagctaccaccctggctgcaagagaccattctgatcaaacccttttcctttattcactgtaaaggctggcttctgttgcaaatgcaaacagtggagtccttaaaatcacaggtttggccccaggctgccagatttcaatcccagatctgctacatgctgggcaagctacttaacctctctgtgtcacagtctaccccactgtaaaatggggcttctcccagctcctatctgatagaatggtcgatgaggtctaaatgaatacatttatatgaggtgctgagaacagggcctggcccatagaaagccttttatgttagtgcttgctgtgaccatatcatgccttgtacccaagttactatattccagtcattaatatttctattcttccctttcttctttgataggaagttctgagctcctcaggcctgtctatttcctctaggtactgacttttgaaattatagagcttgtccttaaaaaccacaggccatccccatcagctggtgaaagaaatctcagccacatgaggagagaaggggtcctggattccttttcctcaggctgcagaagagcagaaacactctgtggcataaatctgcccttctgttttttcaaacaaaggagtcatgtaagacatctggactgcaaaggctgttggtcaagtatcttttactctctagaaagccagtcattctaacttaagttagccagactaacttagtgatttgttgtcctgctaataatatgtaaaataacatctctttctcaaaggcacaaatactggtgagcatttttgtgaagctagaggtctcactgcctcttccctctctgccaggcaaacctgggtgttgacactggtgtcacaagaccaaattgcctagatgtacccaataaatatatacacctactatgtacccaggtaaattaaaaattaaaaaaaaggccgggcgcggtggctcatgcctgtaatcccagcactttgggaggccgaggcgggcggatcacgaggtcaggagatcgagaccatcttggctaacacggtgaaaccccatctttactaaaaatacaaaaaattagctgggcgcggtggcaggcgcctgtaatcccagctactcgggaggcttaggcaggagaatggcatgaacccgggaggcggagcttgcagtgagccgagatagcaccactgcagtccggccggggagaaagagcgagactccgtctctaaaaaaaaaaaaaaaaaaaaaagaaaaaaaattaaacaaaaattttttcttttctgagacggagtctcgctctgtcacccaggctggagtgcagtcgcgcgatctcggctcactgcaacctccacctctcgggttcaagcgattctcctgcctcagtctcccgagtagctaggattacaggcgtgggccaccatgcctggctaattaaaaatatatgtatttttaaactgtatagaggctggtgcctggaaagttgtattagcgagaaataatgtgtgattgtgataaactactaagatttagaagttgcttgttgctgaagcctagcctagccagactgtacacttcttttttattttttagcaacagggtcccaccctgtcactcaggctggagtgcaatggcatgatcatggctcactgcggcctcgagctcttgggctcaagccatcctctcacctcagtctcccaagtatctgggactacaggcatgtgccaccatgcctggcctttttttttttttttttttttttttttttttttttttttactttttgtagagatggggtcttgctatgttgccctggtctcgaactgctgagctcaagctcaatcttcctgccttggcttcccaaagtgctgggattacaggtgtgggccaccatgcctggtctagacttcttatgtgaacaaagcgtttgtttagaaatctgtgatggttttatttattttgagacagagtttcactctgtcacccaggctgcagtgcagtggcacgatcttggctcactgcaacctccgtctcctaggttcaagcgattttcctgtcagtgtcccatgtagctgggactacaggtatgcgctaccacacccagctaattttttttttttttgagatggacttttgctcttgttgcccaggctggagtgtagtggtgcaatctcagctcactgcaacctctgcctcccaggttcaagcaattctcctgcctcagcatcctgagtagctgggactacaggtaggcgccaccatacctagctaatttttatatttttagtagagatggggtttcaccatgttggccaggctggtctcgaactcctgacctcaagtgatccacccgcctcagcctcccaaagtgctggaattataggcgtgagcctccacacctggcagaaatctgtgatggttttacacggcttcgtgttaaatagaatttccccagatgctgactgccctccaataaagatgcctccaggatgcagcaagtgcctaaccaggtgagccctgccatacctatgacaacgttccttctgggagtaaagctggccagcagcaacccagaggagacaagcaggagccagctgctggtgggaaaaaggaaaaaggtcttgagaggctgtgcccaagggataatacctttatgaggtcacggtctggcccttggatttactgggttggaaactccatcttgacagcgacctgtaagtgaacaaaagtggagaggctgactcatgctttcacatagaaatgaaagataatggctaatgtttactgagcactggccatgtcaccagcatgtgccaaatccattcgtttattcatttactctataactattcaccgagtttcctgtttatgccagccactagggaaacagcagcaaaggaaacaacacagcccctgtcttcaggatgcgcacgttctggtgggggaagagacactaacaaacaaatgagcaaggaaccgctgaacaggtcagatggagaaagggctatggaggacaataaagtaccatagaagaaaacaggatgccacagaggttggtgggtcactattcacacagggtggccaaggagggcctcgcccagagggaggcatctgagcagagacccaaaggaaaccagggagcgagctgtcaatatctgggaaggagtcctcaggcagacaactttctatgcattatcctgtttagtctatacaacagcccaggacgcaggttccagaattatcaccacttcataggagagtgtggcatttgtattttccaaagcaggtcacatgactatttctggtcctgtgtgctctttggaaccttgtaacccctcctcccaggagtcagggtctctgttcctccccctttggatctcggcagagctgtgactgctcctaccaatagaggaccggcagcagtaaggccatgagacttcccaggctgggtcataaaaaacaacttgcacctggctggctcgctcaggatgctcacccatggaagccagtttccacggcatgaggcagcctaaagtagcccaggcagagaaaccacatggagaggctcaggtggagaggaactgaggcccctggccaacagccaccatcagctgctgggtgagtgggcaagtcctcagaccacttaaaccccagccttcaagtcttcctgctaaggcacaggcactggggagcagaaacaggccacctcactgtgctcactctgaattcctggcccataggatccatgggcacaagaaatggtggttctacaccagtgaattgtgggacgatttgttctctagacatagtaaccgggacagggagtccctgctgcacagagaggtcaagtcactcacttaagacggttctcatttcatgacagttcagtatgtgcagaccactgtgctaagttctcggcaggtattatctacagaaccttcccaatcacccttttcaaggtaagaatgatttcccctttggggagatgagaagcagaggctcagagagcaaatgacttgcccagggccacaaacctcttaagcggcgagccagacacatgattttgtttaatctttccctccactctatgaggtagggatgattatcccatctttgaaacctacaaaatgatgctcaaagggtgacaattctccttcccccagacctgactccactcacctagaaaacagtggggacgcagctgaaatccagaacccaaaagcccatgttcttcacctggtgccaatttatacaacgaaaacgcaaaaccggactgggttcttggggcagcaggtcagaacattcttgtagatttaaatctggaagctgatgttgggtgtggaaccacggcaagagagtcttttaaccatgtgccacccccggttctgacaccgtcaccagcctggtctaggccaccatctctcccttgtgctactgcagcagcctcctaactagactttcggcttctacgcttgtccctacaatctattttcaacccagtagcttgacggatccacttaaaatctaagtcagaccctgtctgtgtccctgccctggcccatatggtgggtcggacacggtggctcacgcctgtgatcccagcactttgggaggccgaggtgggcggatcacgtgaggttaggagttccagaccagcctggacaacatggtgaaaccccgtctctactaaaaaagtacaaaaaaaaaaatcagccgggcgtggtggtgggcacccgtaatcccagctacttgggaggctgaggcgcaagagtcgcttgaacctgggaggcagaggttgcaatgagccaagattgcaccgctgcactccagcctgggcaacagagcaagactcagtctcataaataaacaaataaataaataaaatgtaagtcagaccctgtccctcctctactcaaaaccgtatggtggatttcattttagacagaataaatgctgaaattcctaccatggcccaggagccccctgtatgatctgccacttccctgttccctctctgacctctcccacctctccccttgctcacgctgagtcagccacaacagcttcggtgcttttccccaatcgtgacaagaacgtttcttccccaagacctttgcacctgctctcccatctgcctggaacgctgtccccctaagagtgcacacagttaacttcctcatcacattctttagctctctgttcaaatgtcaccttctcagagaccttcttggacacgattttactgtgttttttcttttcttttttttgagatggagtttggctcttttcgcccaggctggagtgcaatggcacgatctcggcttactgcaaactctgcctcccgagttcaagtgattctcctgcctcagcctcccatgtagttgggattacagatgcgtgtcaccacgcctggctaattttatatttttagtagagatggggtttcaccatgttggccaggctggtcttaaactcctgacctcaggtgatccccctcagcctcccaaagtcctgggattacaggctcgagccaccgtgcctggccctggacaccattttactaatagcatgttttatcctccttaccttgctttatttttcttcacagtgcttgtcactacctgacatactctgacttactagaatgtaagcttcatgatggcggggacttttccctgccttgtttgccacagtgtgcccagagcctcaaacaggcctggcacagagcaaatgctgggtctacgtctgctgagtgaataaatcattgtctcctttgcaaaagaaaatgtgccaagaaggtgggtggggggggtccccagctgtgtcagtacacattcatctctcaggcaaatctagacatccagccagagactcaaagctcagggccggaattatctagctggatggtccctaaaaaagacgtgccacttagaagcagatcagtacaggggttaagaggataaacttgggaaataatctgcctgggtttggatcttgcttctgccatgtattgcatgatggacagagttttgctatgtcacccaggttggagagcagtggcacgacctcagctcacttgcaacctccgcttcctgggttcaagcgattctccctgcctcaacctcccgagtagctgggattacaggcgcatgccaccatgcccggctaatttttttatttttagtagagatggggtttcaccatgttggccaggctggtctcgaactcctgaacccaggtgatccgcccacctcggtctcctaaagtgctgggactacaggcgggagccaccgtgcccagccaaattttttggattttagaacctattacatattacaacaccggcgagatccaggggcaactctccataagtatatgatttgcacaacaaaatctttaaaaattctaaatagtcacacatcagttcagagtgggtattgccagcaaacaagttcaaagccaggtgaggttggcctgccaagtaagttgcaaaacagagaaaaagacctttcagttttcagaacgttttggattttaaagttatagataagggactgcagacctgtaaatattctttaacatttcttttttagtgtctggcatccccaaccaccctgagaatgtgaattagctgggcaggatttttgttttagacactgctataataacctgggcttgaacagtgcctattagactagcaccgttcaaacccaggttatagtagtgtaatatcggttgcacggagccttccatatagtaaacgctcaataaaattggatgtgctgaagtcacctatgcaatggccaggtcaggacttgaaaccctaagactccaaccctcaggccagtctttatcttaatttatttgacttattcaacaaatgtttagggaacagctgctatgcgtcaactactgtatagtgttcctcctagaaagttcaggaaacagcacagcaaaaaggctaaaagtcagaccccacctcagcgcaggtggggcgattgcctaggcgacgacagagcctcccttcggccgcacctccatagaaaccacgggatgacttagacgccaagtttcacagcggaggagctgtcgaacttcccacaagttccgcccatctccgccttagccatgcccaacacggagcccaaggtggcttgggaagctcaagaggaggccagtgaaccccgcgacccggagccgctctcattccgaaccccgacagcaggggcctccgcctcccacaaacggtcgtgctgacgtcacggacgccccggccgagctgcggctagggggtcgggggacgtcccctcgttcgcctcgcttcccctcacctctgtacttggggactggggtgggattctgggcttctgcagcctgaccctcggatcctccgcagttacccggactcaccttctcagttgcccagcgaaaacttccgctgggcggagagcgctgcgcgcgcatcctgaatctgaggcgcccgcgcaggcgccgctgacttcctgacggcccctgggcttcgcctgcctgggaactccgtttcccagatgcctccgcggcaggcccgccctctgattccagacggaatggggattattccctcattgctcatccccctcccctccgttctagccgctttggaacgccttctggttctactgcgcatgtgtcagtgtcagaccaatcggaatgcaccgtgaggtacctctccaccaatcagaggtcacattacctaaacttctgcctcaactccgccccttacttccgcttgttttctcagaaacccgtcacaacgcgtttccatggcaacctaccgcttgctcttcggaaaaggttaacactccctgacttctagtaaaggcaagaagctaattagatgattctttaacaaggtaaaaatctggactacaaactgatgccgcctggtcctgattctctttctactctactcccacagtgctaaggctgaagaagcaggaggagatgggaaggcgaaagaagtcgcccgcacagccctctgggaaatagagtcctggcgctgccgcggaggatcctgggtgcagccgctcagagaagcttctcgcgcacaggaagtcgctgcgaggaggcgcgtgtgcggggagttgaatctcccgctcccttgaggctggggttgcgtctgttgacgcggccgactacaatcccgaggtacggagacgctggggctgagggacttgcgggctcggtccttcctgagaggtgacggaatgcaagtgggggcgacttcggcaaagggtgcgtcgccttgggcggcggttgtcagggtgaaggtgtgaaccgtctttcacagtctgttatgaaaaccgctcaaggtctgggcacggtagatcacgcctgtaatcccagcactttgggaagccttggcgggggggatcacttacagccaggagttcctcgaacccccagtctctactaaaaatacaaaaattagttgagcgtggtggcgggggcctgtaatcccagctactcaggaggctgaggcaggagaatcgcttgaacccaggagctggaggttgcagtgagccgagatcgcgccattgcactccagcctgggtgacagagcgagactacatcttaaaaaaaaaaaaaaaaaaagaaaggaagaaaaccaccttgggaggctgaggtgggcggatcgcttgagcccaggatttcgaggctagcctgggccagatggtgaagccctgtctccacaaaagaagaaaaaaatagaaaaattagccgggcgtggtggtgcgcccctgtattcctagctaattgggaggccgaggtgggaggattgcttgaacccaggaggcagaggttgcagtgagctgagaaagaaaagaaaagaaaagaaaactgctaaaggggtttccaggcctccctgatggccctgagaggagtggttctgttttattttggttttggttggggaaggaggggaatgagttacctgaagttggcaaatttaggcagaatcttgctggacgatggatgggagttcttcgggaagttgaagtacttaacatttacagtatttgagtgctttctgtgtgccaggcgccctgctggagttgcatttcctcttctgatccccgcagcagcactgagacataagtgcaggtccccttggcaccaaggcaatctcgggaatcagaatttttcagattttagaaagctaatagggtgcatattttataattaggcagcacccccccacaccccgaggaatctgggccagtttttggtcataaaatgtttctgtggggcaaggtgtgaatattcacacttatgagaacattaagaccctacatggcctgtggcaatccaggtgaagttttgcggtcagtttataaatcaagttctggtttttggagcatttaaaggaccatagatctgttgtatttgttccatttggtacatgtggaaactaaggcttagagaaggtaaatggtctggaaggaagggcaagactcttgggcccaaggtctctcagcctgataattgtttggcttaagtcactctgggctggatgaccttgggctccacctctgggccctcgtttctttcctcccagagctgagagtatatgagatgtgggcagaatgtgatttggtaactgcagacagggatctcaagctcagctgtctgtgagggccaggcagatgacatacaggaaagaagagaactggtccaggtgaggctgcggggccttggggagcacttgcctcatctgaaggggagaattgtgttttttttttgatgacagagtctcgctctgtcacccaggctggagttcggtctcactggaacctccacctccccggttgaagcgattctcctgcctcagcctcccaagcagctggaattacaggcgtgcaccaccatgcctggctaatttctgtatttttggtagatacgggggtttcaccatgttgatcaggctggtcttggactccaaacttcaggtgatccgcctgccttggcctcccaaagtgctgggatggcaggcatgagccactgcacccagccgctttttaaacttaaatttaatttttttggccgggtgtggtggctcatgcctgtaatcccagcactttggaaggccgaggtgggtggatcacgaggtcaggagatcgagaccatcctggctaacacggtgaaactccgtctctactaaaaatacaaaaaattctccgggcgtggtggcaggcgcttgtagtcccagctactcaggaggctgaggcaggagaatggcatgagcccgggaggcagagcttgcagcgagctgagatcgcgccactgcactccagcctgggcgacagaacgagactccgtctcaaaaaaaaaaaaaaaaacaaatttaatttttttttggaggcaggatctttctctgtcattcaggctggagtacagtgacacaatcatagctcactgcagccttgaactcctgggctcaagtgatcctcctacctcagcctcccaagcgatcctcctacctcagtctcccaagtagttgggactacaggcacgtgccaccacaacttgctcatttttaattttttttttttagaaacaaggtcttgttacgttgcccaggctggtctcgaacacctttcagcctcccaaagtgctgggattataagcatcccccacttgcctagcactggtgggggagctttaaatgggcaccagtgaactaacttcgtgggatgtagacccaatgttgccaaatcctaggatgtttcagaagttggaaacataatttttaggtgaaatttcccaattttcaagtttgagactagtgagccatgcttgaattttctttcaaaacattctgtctgccaacaaacattatgggccaaatatctgtcaactgagttatactcgtaggttgaggcttaacctctgacatgtagaaaaactcattgttcagtagaattagcatttattgtaggtctaccatattcccatatttgtagtctcaaaaatctggacaactcagaacaacaaattttttttcataaatttagtgtccgtgccttacctgaactactacagggtattttttaaatataactttaaattattctacctagaatgaacgatgatacttttctctagggtaaagtgttcaattatgaaatgcagcctgatccacactgcgctgggactttgttttgttttgtttttgtttttgtttttgagacggagtctcgctctgtcgcccaggctggagtgcatggcgccatctcggctcactgcaagctccacctcccgggttcacaccattctctcgcctcagcctcctgagtaactgggactacaggcgcccaccaccatgcctggctaattttgttattgtatttttagtagagacggggtttcaccgcgttagccaggatggtctggatctcctgacctcgtgatccgcctgccttggcctcccaaagtgctgggattacaggcatgagccactgcggccagccctgcactgggattttaatgaaatatgccatgtatatgccatatcaccttttgaaaataaaagttgaatttcaaagcacatctggccttggagtttgaagaatttgtggacctgtgtcattgttaagtgatccgtgctgctttgtgatatgaaatgctttcagcactccgcagatatgtgctacttggtccacgcagtggatacaaatgggtaaaaatgtctgtggtacagttttgcgtattatgggtcatgaaaataactaggtgggcagtgactatgattttttaatgaagtagaataaaagagactagaatagaaaacatcccagtgcatcttacattgcagggtaagtattgcttcatgaagcttttgtttagttacactgtgtgtttgagtagtcatgatactttttttttttcttttttgagatggagtctcactgtgttgcccaggctggagtgcggtggcaccatctcggttcactgcagcctctgcctcccgggttcaagtgattctttgcctcagccttccgagtagctgggatcacaggcacgtcccaccaagcccagctaatttttgtattcttagtacagacggggtttcagcatattggccaggctggtcttgaactcctgacctcaagtaatctgcccacctcggcctcccaaagtactgagattacaggcgtgagctactgtgcctggcctattctacatattggtggtgttactgtgggtcacggttaaaacaaaagttgaaatatttctgttgtagagatagtggccaggtgcggtggctcacaactgtaatcccagcactttgggtggcccacgagggcggcttacttgaggtcaggagtttgagaacaacttgggcaacaagtgagatcctgtccctacaaaaagtgaaaaagattagctggatgtggtggcacatgcttgtagtcccagctgcttgagaggctgaggttggaggattgcttaagcccaggaaattacagctgcagtggcccatgattgtgccactgtagtactccagcctggcaacagagcaagaccgtgtctccaaaaaagagtaacagtttcggaggccaatttacctgaactcaaattccagagatgataatcagaaatcccagaagcattgttccattggttctttagacaccttcgttctgtcaacaactgtaggtacttttacacctactgttaaagcacctactgcgtactaggcaccatgctggtgctaagacacagcagtgagcaagacagaagctcccactgtggccatagactttcatcaccaaatctcctaaacatgtgctgactgactgttaggtgctaacccaccattgttggtggcgaagctgttctgtaggttctgaagcacagtgcaaatgtggggctgaggtggcttcagtaaatatagttgttgttgtcccctgcagggagactcacattgggacttgtcctcctcctcctggacattttgggggctcgtcagcatggacagcgagtcagccatgggtggaagggaggctttctcacagctcccttgtgcttcccacagccctgccagccgggaacacggaggggaaggaggaggagcttaaaagaggctactgaaccccagttggccatggctgaggtgagttgaaggtcgctctgtcctaatcggtcacacccaaaggcagaaaaattggccttcctttgtggccgaggcgagttgaaggtcgctctgtgttgattggtcacccccatggcaggaaagctggccttcctttgttttggcctccctgtcccatggtggctcccaggcgatcttttttaaaggaaagctcgcatgctgttctttcctgtttgtactcttctgggaacccctattgcttatagaataaattccaggtttttcagccttcctgtgtgttctggcttctaccctctttgcaccatcttctgtcatttctctagataacaaatactccctttggcctagtagtaaaagttgattctgtactttccagcagcttcctttgctcaggttgggccctctgctggaattccctgccccttttccatgtggtagtgtctcacacagcctttaagacccggctcagttcccccacccttccctaggcagtcagcactttcctgctctagccttccatagtaccccctgctgcctccactgtagcacagatccacctagatatggatgttcctgcccatatctgtcagccccaccagactagatgctccttggggacaggaactgatggggattcatctctgggtccccagggcccagcacaggccaggaacacaggaagcctcatgaggtgttagttgaatgaatgaatgaatcaatgaatgatgcatgaaaccatctctctatctggtaaatatctgttcatccttagtgatccaacttgaatgaccttccctccaggaagctttccctgacctcaaggcaatggcctccctctcccccttggcccacacagtccccgatacctccctttgccacagtcctacctccctcgtgtctctccgtcagaccatgagctccatgaggccaggaaacaggtctgacacacgtccatgtccccagtgcccacaatgtggtctagcacacagggtaaatgattgccaaatatgtgctctgaccttgtcactttcctgtggctccccagtgcctcaaggatctagtctgccccgtcttcccacctccttcatcactgtgacaggggccttgtccagcgcagtctgggagtgtgaggaaaggaagcccctcaaaggtcctctttgatctggctcctgcttggctgctactcttgacaggatatagacagcaacagtttctgttataagtaccagaaattgacttacgcagtcaggagactattaattatataaccaaaagtccagaggtagggctgtcatgatctgcaggtgtgactgggactcagtttattgtccccatcttgaacctcacttagtatgggttccatccttcatgagctccttcccttgtcccaaaacagctatcaggaccatgtgctgctttgcctcattcaacaagtatttactctgtgcctgtcatgagtgggctttgttgtaagtctggactagggaaacggtttaggtggttcctgccctcatgaagcttactttattgcgggtgacagtgtatgagcttgctagggctgctgtaacaaagtaccacacactgggtggctgaaaacaacagaaattggtggtctcccagtcttggaggccagaagtctaagatcagggtgttggcagggctggatccttctgaggctgtgagccaggcctctcccctgtgttctggcagatggtggccagctttggtgttcctcggcctggagaggcatcacctcaatctctgccttcatcttcacaggatgtcctccctgtatcttcacattgtcttccctcagcctgtgtttgtctttgtgtccccatttctcctttttataacaacttcagtcgttttggattaggacccaccctgatgacctcatctcagcttgatcacctctgtaaagaccccatttccaaataagggcaaattctgaggtactgggggttagaacttcattgtatctttttagagggttacagttcaacccataccacacagtaaaatgcattaagtaaatcccatagaatgcaggcagtattaaggattatggaggaaagggatagggaggcccagggtagatttgctgttttatacagaggggtgggagaaggcttcatggagaagaggcatttcagcagagaactgagggacacaatcttggctctaagatggggtctggcaggtgtgttcagggagctgcaaggaagctggtgtggctggagcagagtggatgagcaggaaagggggagaaggtgagccctgagtggcagctggggccagatctttagggccctggagatcattgtatggtctctgtctttaaatatggtgaatccggaggccgttggagggtttggagcagaggagggacaggatttgttgtaagcggaaacaggatcccccttgctcgtccacccaattcctgcttagcatcaccactgggacgactgtttcagggtcttactgctgctgtaacaaataatacaaacttgtgggcttaaaaacaacacaaatttattcttttacagttcttcaggtctgaatcccaaaatgatctcacggggctcaaaccaaggtgtcagcagggtgcgttccttctggaggccctagggaagaattcagtccttgcctctcccagcttctggaggctgcctatattcattggctcctggccgcatcactctaatctctgcttctgtcatggcatcacctcttttctcctgtgattccttgtctccctcttattaggatccttgtgatgacatttaggaccaacccagataatctaggataatctccccatttccagattcttaatcacagctgcaaagtccctttcgccatgtaagataatattcatgggttctgggaattaagacagggacatctttgtgtggggtggcggcattattcggccatgacaatctacaggatatctcaaactttacatgtcccaaaccaaactcagactctgtcctgaaagctgcttctcctatgtctcagtaagtggcaactttgtccttccagctgttcaggctaaaaacgtagagccatcccagggtcttctgtctttcacaccctccatgttattcgtcaggaaaccttgtcagcaccgttatctgaatatctggaatctcaccacttctcaccccctccattgctgccaccatttctcacctggattatcaaactggcctttttcctttgactccctgcttctgcccttctcaccttctgtcttttcccacgaagcagcaagaggaggatgctgtttagtatatgcctaatttaaaaaagtttttttattgtaaaatcacaggtgcagaaatgcacacacatcaaatgcatgacctaatgaaggcgaacgccacctagatcaagagtgagaattttttttgccatccaccccagaagtccttcgtgggctctgtcatagccctctcgcatccccaataagtaacctgatttttatgattaccacttgctttattactcaaatgcacaatcccttgccccttcttgttttttaatgtcttctgtgtctcttaatctttgggttcctcctccatccccttctgttctcagctgttagttagagaacagttattcggtcctttgaggaactggcatggttcgacctgtagaattcctcagtctgttttctctggttccatccttgtggtgcagttgagtttattcccagttggcagctaggtccagaggcttgattagactcatggtcaatccttttaccaagaatctcttgtgccccctgtttgtggtcctggcagatagtgatgctttctgccttatcacctgttcattcatcagggcttgcaaaatggcgctatcatttcttttcatgtattagttggaacactttacaagacatcctttggctgggcatggtggctcatgcctgtaatcccagaactttggaaggctgaggtgggcaaattgcttgagctcaggagttcaagatcagcctgggcaacgtggtgaaaccccatctctacaaaaaatttaaaaattagccaggtgtggtggtgtgcacctgtagtcccagctactcaggaggctgaggtgagagtatcacaggagcccaagaaggttgaggctacagtgagctgtgatagcaccactgcactccagcctgggtgacagtgagaccctatctcaaaaaaaaaaaaatttatctactatttgtctagtcgacggtagagttcatataggacaggtagggtaaatgcttgactctccttttatttgctagttttcactataaggaattggtttccttctgtcatgtcatccttcagaggtgaccagttctttcatacgtgtgtgtgtgtgtgtgtgtgtgtgtgtgtgtgtgtgtttggctgttcttaagagttttacaaagcattttcattgtaattcaatgtaacacacccaggttaaatctcataaggacaggaactggctgcccccttttttcctgtacctagcacaggggctggctcgtagtaggtgcttggtcatcattggacagataagtagacaacaagcaccacttatttagcagcttcttagtgagttgggtctctgctgagccctgtgtaggcatcagctcacttcatcctatagcagccttattttagagaagaggcaggctgagcattagagaggtggactaacaaggtcccacagttaatagatagtagaactagaatttgaactgggacctgtctgactctaaagctgagcctctaacaggtcagcctcctggggattgtgtagcagatgggagctcgtgccaccccaccacctactcaccgtgtgctgtggttggaatgtttgtcccctttgaaactcttttttttttgagagggagactctgttttctaggctggagtgcagtggtgtgatcttggcttgtggaacctccatctcctgggctcaagtgatcctcctacctcagcctcccgagtagctgggactacaggtgtgcactaccacgcccagctaatctttttgtgtttttggtagagatgggggttttaccatgttgcccaggctcatctcaaactcctgagctcaagcagtctgcccgcctcagcctctcaaagtgctggaattacaggcatgagccaccatgccccaccaatcgaaactccttgaaatttaatccctaatgtagctgtattaagaggtggggcctttttttttttttttttgagatggagtctcactctgtcacccaggctggagtgcagtggcgcaatcctggctcactgcaagctctgcttcccaggttcatgccattctcctgcctcagcctcccgagtagctgggactacaggtgcccgccaccatgcccagctaatttttttttttttttttgcatttttagtagaggcggggtttcactgtgttagccaggatggtgtcgatctcctgacctcatgatccgcctgccttggcctcccaaagtgctgggattacaggtttgagccactgcgcccggccaaggtggggcctttaagagatgattaggtcatgaaggctctgcctgtgtgagtgaattcatttattcatggaataatgggttatcatgagagtgggtctgttgtaaaagccagcttgacattgcttcagttccctcaccatgttatgcgttgtgccattttagggctctgtagagtctccaccagcaggacgaccctcaccagaggcagtctgttggccttggacttcccagcctcgagaactataggaaacaaatttcttttctttataaattacccagttatagcaacagaagatggactaatacactgtgtaacttggagaaagtgactatttgggccttgattttgttttctataagttggggataatcctgcctcaaagaggagtcaggcagttcagtgactcactgcacctaaagcattgaaccattgccggcatgcagaaagctgttggccaaagaagggcttttgcagtcagatgcctggagggttgggatgggcagtgtaagccagagtggaattgcccctttgtcgagctcttcctgtgtgctaagtactatgcagtcacctcccagcagtatttcagttgcttcttgtagcagccctgatgagatgggactcgttggtcccatttcactaggggagcaggaattggggtcacaagagacatgcagcttacttgccaatagtcactcataaagggaaggtaatagggccatacctcagacccaaactaaagagaggtggttttcattctttcttaaaatgtgcctgtgcccacactgatggagatttggaagagacacatcagtcatggtttcacctagagatggggtgtgtgggggcaggctttcacgttttaatgttggtacttctcaagtatttgaatttttatcctaaacatccattaactgtccaggtacagtggctcatgcctgtaatcccaacacttcaggaggcaggggcaggagaatcacttgaggccaagagttcgagaccagcctgggcaacatggcaagactcctactctaccaaaaaaaaaaaaaattagctgggtctggtggcacaagcctgtagtcctagctacttggaagctgaggcaggaggattgcttgagcccaggaggtggaggctatgatcgtggcactgcactccagcctgggcaacagagtgagacactctctctctctctcgctcgctctctctctctgtatatataatatatataatttatggattaccagatttataaattaccataacttacaaacgacagaaggaaaccaattccttatagtgaaaactggcaaataaaaggagagtcaagcatttaccctacctgtcctatacgaactctaccgctgactagccaaatagtagaaaatttttttttttttttttgagacagggtctcactgtcccccagggtggagtgcagtggtgcgatcacagctcactgtagcctcgacctccttgggctcctgtgatactctcacctcagcctcctgagtagctgggactacaggtgcatatataaattataaattataattttataaatttataaatttataaattatatatataattatatataaaataaaatttaatatatacatgcacacacacataaataataataaacacttattaactaggaaagtcttaaaatgaaagatggcatcactaaaagttggacaaccagataggagccttgggtaaccatgtgttacccaagcggacctggtacctaaagcggacctggtaccacctgtgagtgggtctttcccccagaagctgtattgactccagtcaggcctctgctctcctgaccagctcacaggaaatgcgtggccagggagcagccaggtgacactgcatggaagcagcttgccacactcagaacatgggacctcaaatcaggagcatggaggatgtagaaggcacagcggtacagctgtagatttcaaaacctcagaaccacatcagttacagggtatgggccccctggattctgattgagacgagctagctataaagacacaccactgagatgtcagactaatctgtatacagattttgaatgtggtctaggtgttcagtgattaaggagttactgttcatactgaagtattcacaggtgaaatcagatgacccctgggtgatgagttcatgggtgttaattatatacatctctacttgtatgtatgtttgaaagtttacaaaataagtcttgaatgaacacttaaagcaaaagcgtaaaatagatttttaggatcaggcagacctgggttcagtcccacctgtgttaacttcggttgacatcctgtcccctggtcaaagtcaaggtccttttctttgcctacaaaatacaggggtttccagtctcttacatctcaagattcttgtgaggctgaggatgggatggtttttgccaaagccctggcagattgagggctgggagtgccctgagtgagctgttgggctcctccctgaccccagcctctgagtgaccaatagtgtactgtgtttcaggaatttgtgaccctcaaggatgtcggcatggacttcaccttgggagactgggagcagctcgggctggaacagggggacacgttctgggacacagcgttggacaattgccaggacctcttcctgctgggtgagtgttgcctgtccccaggggcctactcactgccctgcttggtgatcacccatgctctctaccacccacagggtgaagtcctggctcctgggctcctcagaatcagcatgacctagcccagcagttctcagctggccgaggagacattggcaatgtgtggagacatttttgattgttactccttgggccagcgcagcgtgccgctagcatctagctggtggaaccaagggaggctgccacacatcctacagtgcacagcacagccccacaaccaaggattggcccacgccagtgtcagtagtgctaagcctgggaaaccctgctctggcccctatctgcctccccagccttgtcttcaccactttcctacttgtagtcagtcattcttcaagctgatacttcaaagtcttccagttgccctcccctctgcctaagcggctctcagggcttacatttttaaagtttaacctgggaccctgttagaactccatacctcctctcctactcatcttgtctgtcgctccctcacgttctaactaccattgtatcattcagagcgggagctgtgtgaggacagggcgtgtccccagtgtttggaacgaacagtacctgctctagggcccagcagacagctctaaactaatgaatgattgagtagcagctcttaggacttgcttgttcaatcctccagtcaccccatgaagaagctgggttgtccctcttttgccgattggtctgaaactgaggttaaaagagtggcagtcaccttcccagctgtgtcagtgtccccaggagcacccacagattcagtgattggctaggattcccaggactcatcctgtagtcagactcatggctatgacttactacagtgaaaagattcagagcacagtcagcaaagggaggaggtacatggggcaaagtccaaggaagccaggcacaagcttccagaattctctcaggggagtcacatgggacatgcttaattcccccagcaatactgtagaatgtgatatcgcgtgtgaaatgctgtccaccagggaagctcatcagagactcagtgccagggtttttactgggggctggtcatgtgggctcctctgcctggcacattccaaaattccagccccccagaaggaaagcaggtgtaagccaccgtgtttgcacagtttaggtccagggagcgtgtctcttcagttctggagacacggggtacccccctgaaatccagccttgccagcaggcttttcccaggagagcagccagcctgctgtgtcgccctcttctgcacaccagtgtcacacagtgagacagcagcagggcccagactccagctaaggtctgtgcagctccaaggccatatcaccccagctccccatcagtgtcacctgattaactcattttccctctctgttgcctcagttctttctttttgaagaaccagaaaaataatttactccaaaagatgaaagaagtaaaagataacacacggtggaaactatcatttgatagaatctcatcacattggggcagactttctccagactggccagtgtgtgctaagaagcatctcgtgggaggtcctacctcagtgtctttttgaatttttaaactacagcccacagtaagaagtgtgtttacctcgactgccccttcacccatttgtgtgaatgtatgagtagtgtatccgtttcctattgctgctgttacacataccacaaacacagtggcttccaccagcacacttttattatgttacagtcctggaggccaggagttccaaatgcatgtggctgggctggaggcgaggtgttggcagggccaccatgttccttctggaggctccagcacgtagatagtccttcctggcccgttgccagcttctggaggtcacctgtattgcttgactcatggcttctcagtcttcaaagacagcagtggcgttttctccgctgtggcctgtatccctcctggatggtgactctgttcccttccttggggaagcttgtggagggtatggctcaggactgcttgggctctgggaccctgacattttctgtccctggcccatggaggcctcaggcaatgtgtggcccatgggtcagtgaataaatcatgaatggctaaggaagtacgtgcctctccacctggcagatcctgcccattaaagagctgtcacaagtcctttgtatccccagccccagctgtcacagctttgatcaccctggattgtgattgtttggctccctctccatcactggactgggaaccctacaggacaggcatccccagagtcgcccagtgcagcacctcgtccacacacaggagccacgtgcaggataaagcatagaaaagtcaggagagccaggaggttctcactgagtgtctggatggtcctccatgtcctggttgggtgacaatgcttttctctccctgcagaccccccaagacccaacctgacctcccacccagatggcagtgaagatctggagcctctggcaggaggaagcccagaagcaacaagccctggtgagtggatggagaggggccccttgtgtaccttctgtcttccagacctccatcctgaggctgcagccagctttcccacaggtctaccgagacattacaacgctcagcttcaggacttcactctgcttctcgctggcttccatccccttgtcctgggagctggggggatcaggacatttttatagaccctcactctggggtctctctaccttgcccttcagcacagggttatcctggtgcctctccacagctcctcctctttccttccagactcaacaagggtacgccctccactctctcagttggtctctctactttcctgccttgtgctccctgagtgtgttgaccctcattctacttcttttacctcctttccttcaggcccatttttccttcctatccctggggcatagcagatggccacatcagggagtaacttaagcccaggcctgaatgctgccaagagcatctgccctgccatctcccaagccggggttcctccaggtggatcaggttaggtggtgaggattcctggggtattacccatggtagagacgtccccagcatgagaagcagggccctgaaccagagaccacaggaatctcaggctgtaccccatccagtcagtctgcagctcccttcttggctcaccacgctcaggctcgtgtacatgaggcctctgcagcctcctcttcagcacatcagtgttcctcataggtgactaactcatgcacaggctctcacaacttctgctttctgtttctgtcacctcagcatattggctgtttccaaacataggtagccatgcctttactaacaaatatacctccatatcctctagtagtgacacttgagttgcatagttaccacataagcgtctttcccctttaacagcatgccgctcttggaagcagggcttagctgattcaccctgtattcccagctcctgacatcatgcttggcatataaggggtgcctattacatgtctgttggtgcatttgaggccgagggaacaacatgagcacaagtgtggtgaggagagtgagctggatatctgtgggagagatgagcagaggcaaaggtgacaattcagaacaagatgtggtttcagaaggctttcatttgcaagttttaattccaggcagagagactttaagcagtctcatagatactcagatggtgagccaagaactgcacaagggacaggctggaaaaggtatgatgatggaggagaggagagatggggagactggaggcatacagcagagcagtgacattcatgttttgtgaaggatcccagagagcatacagcttggtagttaagaatatgggggccaggcgtggtggctcatacctgtaatcccagcactttgggagggcgaggcaggccggtcacttgaggtcaggagttcgagaccagcctggccaacatgctgaaactctgtctctactaaaaatacaaaaattagctgggcgtggtggagggcacctgcagtcccagctactcgggaggctgaggcaggagaatcacttgaacccaggaggcagaggttgcgttgagctgagatcgtgcagcacttcagcctgggcaacagggcaagactcagtctccaaaaaaaaaaaaaaaaatatatatatatatatatatatatatagtcagaggggttcaaatcctcagtcttctgctcacttacctgtaagaaagcagaaacgtgcctaccttacaggaggttgtcgagtgtaacagagtgcctgaggcactcctgcctgtgaacaagcataccatgaatgggaattactctgtcctgtgaatctttctcgtggccgcctctgtggcagtggatggatgagcagtggaaggtccccattaaagaacttaccttctggtaagggtcaggggtcagaccctttcataacctgttatggtagaggatggtcagtgctcagctggttttcagagaatacagggcaggggacttaaagcagaatggggatggggttgtcagggaagcctttcagagaagggtgataagctgggtattaaaagacttagaggagttagtccaggaagtgccatccagcatgagggaccattaaaggcacagaggagaaagtctggtggatttagggaaccgcaagagttctatgaggtcagcacaaagaacactgggctaatacactcatttcttttctccaggcaggaagccatggaagggtttaatcagaggagtgatatagtcagatccattaactacaaagccctttagggctagtgtggaagactagagagagagagagacagacaaacaggagaccaatgagcagcctggggtcagatgctgagtcagtgataaagagaggagaggaagggagttgagacatttcgatagagaccaaatgaaaatagtgccaagttgagggaggtagggaggaggttgactcccaggattctagcatggagaactggatggatggtggtgtggggagagcggggtgttgtctgggatagaggatgcaggatatgaggaggaagattttggtgacagtacaggatagagtggagagtagaagcaggtgagtccaggcgattttttagggaacttggtcagtcacttaggtgtgaaggtaatggtagaatctccctcctcgttgaaccctatggtttcccaactcccttcttgaccctcctgggaatgggctctgtctgttttctgtgatgccagttccacatgggtcacccctttgggtcccttgatggataggctggactcaagatctatcacccctacttgctcttgtctgtgttctcacccttagtgaacaggagacatttgcacttgctctttcagatgtgactgagaccaagaactctcctctgatggaggatttcttcgaagaaggattctcccaggagattatagagatgttatccaaggatggcttctggaactccaatttcggagaagcctgtatagaggacacctggttagatagtttgctaggcgatccagaaagtcttctgaggtctgatattgccaccaacggggaaagtcccacggaatgcaagagtcatgaattaaagagaggactcagtcctgtgtccaccgtttccacgggagaagattccatggtgcataatgtttctgaaaagaccctcacaccagctaagtctaaggaatataggggtgagtttttctcctactccgaccacagccagcaggattctgttcaggaaggggagaaaccatatcaatgtagtgaatgtgggaaaagcttcagtgggagttaccgtcttacccagcactggatcactcatactagggagaaacccactgtccatcaagagtgtgagcaaggttttgaccggaatgcttccctttctgtgtatccgaaaactcacacgggctacaaattctatgtgtgtaatgaatatgggacaacttttagtcagagtacatacctgtggcatcagaaaactcacactggagaaaaaccatgtaagagtcaagatagtgaccacccacccagtcatgacacacagcctggtgagcatcagaaaactcacacagatagtaagtcctacaactgtaacgaatgcggcaaggcttttacccggatcttccaccttactcggcaccagaagatccacactcggaaacgctatgagtgttccaagtgccaggcgaccttcaacttgagaaaacacctcatccaacatcagaaaactcacgctgcaaaaactacctctgagtgtcaggagtgtgggaagatttttaggcacagttcgctgctcattgaacaccaggctcttcatgctggagaggagccttataagtgtaacgaacgtgggaaatccttcaggcataactctaccctaaagatccatcagagggttcacagtggagagaagccttacaaatgcagtgagtgtgggaaggccttccaccggcacactcaccttaatgaacatcggcgaattcatacaggctacagaccccacaaatgtcaggaatgcgtcaggagtttcagccggccctcacatctgatgcgacatcaggccattcacaccgcagaaaagccctatagctgtgctgaatgcaaggagactttcagcgataacaatcgccttgtgcaacaccagaaaatgcacactgtcaaaaccccatatgaatgtcaggagtgcggagaacgcttcatttgcggctcaaccctgaagtgccacgagagtgttcacgccagagaaaaacaaggattttttgtgagtgggaagatcttggatcagaacccagaacagaaagagaagtgctttaagtgtaacaaatgtgagaaaacctttagctgcagcaaatacctaactcagcacgagaggattcacaccaggggagtgaagccctttgaatgtgaccagtgtgggaaagcctttggccaaagtactcggctcattcaccatcaaagaatccactctagagtgaggctgtataaatggggtgagcaagggaaagccatcagcagtgcctcccttatcaaacttcagtccttccacacaaaggagcacccttttaaatgtaacgaatgcggaaagaccttcagccacagtgcacacctctcaaaacatcagttaattcacgctggagagaatccctttaaatgtagtaagtgtgacagagtcttcacccagagaaactaccttgttcagcatgagcgaactcatgccagaaagaagccgttggtgtgtaacgaatgcgggaaaacgttccgtcagagctcatgcctttctaagcatcagagaattcactcaggtgagaagccctatgtatgtgattactgcgggaaggccttcggcctgagtgctgagcttgtccgccaccagagaattcacactggagaaaagccttatgtttgtcaggaatgcgggaaagccttcacccagagctcatgcctttctattcaccggagagttcacactggggagaagccctacagatgtggtgaatgtgggaaagcctttgcccagaaagcaaatctaacacagcaccagagaattcacacaggggagaagccttactcctgtaatgtgtgtggcaaagcttttgtcctcagtgcccatctcaaccagcacctgagagttcacacccaggagacactttatcagtgtcaacgttgccagaaagcctttcggtgccactcgagcctcagccgccatcagcgtgtacacaacaagcagcaatactgcctgtagccattgggtggcagcagagtcccagaatatgagaccgttactcggatgttgaaagttggaaactatcccattgcaagtttctctccaaataaatgcatctaaagattgattagaaagtttgtgcgcatgtttttcattataacaatgaaaacacaaaagtggagaagctgtacaacgtcaggattcagaggtaggctctggagccagtctaccttgagttaaatcccacctctgccatctactacctaagtgaccttgggaaggtcagaaaaatctctcagggcctcggtgtccttatctgtaaaatgggcatcacctacctcagagggcttttctgaggattaaataaataaatgtgaagcacttagaactgatggccagcacatgagggctcaccaagtgtaagccacaaatacacatcagctatagcacaaatatacttgtgttacaagaaaggaattagtaatctgtgtttactgtagttaatgttcttacaatgtatcgcttttaatttaagttttccttttttacagtttttctccagcactttactcttcttaagtgcctggccttttttgtccctttatctctcctggtttttttcttaagccccagaaagccaaaaagaacatgtaaactcttcacctcaactagctacaaccttccactcctaacctcccaagcttctcacttaaagaggactccctatcccacaaacacatgctccctcttcctatgaccttcctccatttaacagtgttggttatgcaataagacacccaatttttcatgggagttgacaccaaaacacagctggattccatcaggaaagctgcattgatcagggtgttaaccgcatatgaaacaacccatatggaagacatacttaggggtcaaacctgtggtgtgtggaagtgaccactgggatgtcatcattcaccatttatccaggatggccgctcaccaggcaatttgctaggctcgggggcgggtagtatccatacactatgcactactgctctgaagcttctggaatcagaaatgaacccattttcatcgacgattgctgttagttgacaagtgacatcttgaaaatgccacattccctcatgtcacaggaagttctgggatcaccaaggattgttggagagtccagtgagatggaaccacacaaccagttccctaccagtgtcttgtcagctctgggtgtttgttccctgccactaagtggctcagtcacacctttgctgaaacacagtagtcttatgaaaagcactggacacatactttgaatacctttcatattttaggtgctgaaaatggtgagggagtgagtgctctgcacccttgggcttttcaactcttgcacctggagttctgctggttaagtttgttaaacttagttgaaactgggaacctgttggctaaccattggggccttacactgtttttcaaatggttgcaacatttaacttctcgcacatggttcccgtcctctggagctctgtcttgtcggggagatgggcatgttgtataccaaaagagtgtacaaagtgttgcagggctgtgacacaatagggactctatggaaaactggcagccattgggtgtgggggcagtctgtaaatcagtcacctgtgttgctgcaggccaaggtagaaacgccctccgtgtgtgcatatttgttggttctctgattaaagttttgagtctaaaagcattggttccttctctcagcctgctgccatgcagccacgcatcagtccctgcctgccaggcctcacgtctttgctggggagggcttctggtggcgatcagtaagagggagcagctcagttttcccactgtctgggcggggcatgcgccactgaggaggcacacaagttcagctggtcctcagatgcatcatcaaacaacacttttcagtctgtgtgtgggcctaagtaaccaaggagagagcacaggcagcctgcagttcactcttcacagacatgtcaggccccaggcttggggagtgtttctaattagcatccagtaatacatataactttgtttatactttaatttttgtccccacctttttcctttagtgacaagtgacaagagatactagttcctgctcatggtagtaatagaaagttttttttttttataaactgagctgatagggccgagtgtggtggttcatgcctgtaatcccagcactttgggaggcctaggtgggaagatgacttgagcccaggagttcgagaccagcctcaacaacgtgatgaaaccctgtctctacgaaagaaatatgcaaattagctgggtagtggccactgatcacttaaaaatgattaaaatggcaaattttatgtatatttttacaatttaaaaacatttaaagtttaaatttagataaaagtttaagtttagataaatttaaaacattttaaagtttgtgtggtaggctgggtgtggtggctcatgcctgtaatcccagcactttgggaggctgaggtgggtggattgcttgagctcaggagtttgagaccagcctgggcagcatggtgaaatcctgtgtctacaaagaatacaaacagccgggtgtggtggtacacgcctgcagtcaagctactagggaggctgaagtgggagaatcgtgagcctgggaggttgaggctacagtaggctgtgatcatgccactgcactccagcttgggcgacagaacaagaccctgtctctgaataaaggaaaaagatgtgattggaaaaagaaatgagctacaggagcctaaaccaagcaaggctaagatggcaaaacccaacacctctgaggctgatgcaaagacaagctcaaacgaggtcaaggtataaagcagcagcaaagtcttctctagggccaaggtctcccccaacatttcagagatggggaccccttgtcggaactgataccccagctaaattccagcttgacttctggaagggctggagactaaggtcagtcagggtgatcagccctgtcaacataaccaaccccataaccctgggtaccacggcgtgggtgagcttctctggcaacactttgtgtgcggtcacacatcattgctgagtgcgttaaatgctttccatatgactttactggcagaggacacctggaagctcacgcttggtctctcctagactccatcctatgcaccttttcccattgctggttttaatctctattctttagctgtagtaaatgcaatcaagtataacagctttgctgagttttgtgagcccttctaatgaattactgaacttaagggtccactgccctctctgagcctcagtttcttcagtggactcaagaatgatactcagtgtaaggattctcaaaacgagcatcagcaggttccgcccacgccggcctcctgggttcagttctctaataaccacctcccttccccgcctactccagccaatccttgtgctgactcggctcctggccacgccctaaccccacccccgctgcctctaaacccgtccccacccctgcagcctcacaggctgccgtcagattctcaagcccctattcctctcggtggcctaaatccccaactgctcggggccacttttcaggccaaaatgggcccaaaatggggagggcaagtgatgaatgtcactagacagtggggccctcaaggacctggcaaatgggggcttggacctcggatcggcctcccacgcgaagcttgctccccaccagcatccccacgttggtggcgacgctgccccggccccacggatacttccgcgcctgtcagactccctgatgaactacccttcccagagtaccgcgggagctcgggctcctgagggcgacggtcctctgatggcagatgcgggagaaactctggcgtcaggcggccctcgcgtggagcacacgaagtcgtggcttattctggcttcagtatgtggggtggagaaggcgatccacgcagctgcgtctatttcctgtggatcaatcgcaaaatacgttctgtaagccccgcccccactgcgtgcgggcggcttttgtctccacggcaaccgtcaactctggaaacgcctgtctttctccatggcaactgtctacgccgcaggctggagctgcccattaccggagcccgtaagcagtatgggtgctggacaaacagcgtgatcgggtcgtaaaacttggtggaaaacgaatattagagcacaaggaaggaaaaaccgggctgggtgggactgaaatagttgatgtgagggaagatttctcaaagggagactatttttttattgtttgtttgttttttacttttattttttcaagacggggtctcgctctgttgcccaggctggagcacagtggcacgatctcggctcactgcaacctccgccttccgggttcaagcgattctcctgcctcagcctcccgagtggctgggattacaggcgcccgccaccatgcctggataatcttttgtatttttagtagtgtgaaaaatgggaaagttattcttcaaagattataaaaagtcacaatttcttagtataagattgctatccactattatatattccaaatcagctgtcctagcttgctccggcatgcctggacagaactagacaagccccaggacatagtgcatagttaaggaagcatccttaactatcccctgggcaacttccttttctttgttctgttccccttacccagttaaaaaagttttaaactaatagccaatcgggtaaagtgtaaaatgtgaggtcctattccagccaatggaaactggacacagcagtagggtagacacatcaggttataataactctgtctccttagtttggcggggtctcgtggctggacagctattgagtagcaccctttctgcaggaagtaaagctcaccttgctgagagatcatttgttcccgcattaattcttttttttttttttttttttttgcgacaccaaaaacctcgttcccaacagtaggggtttcaccatgctgcccaaggctggtcgccaactcctgacctcaggtgatccacctgcctccccctcaagtgctgggattataggcatgagccactgctcctgtcccatgaggcggcctttgaaaaaggctttgagggatgagcaggaggtcgccaggaagagaagggaaaatatactatatctatagatctggccaaaattaaaagtctcaacgagggtgtgaggaaactgccgttctcctaccctgctggtagggagaggaatgtcttcagcctttgaggaagtaaatcagtcagtcagttggtgatgtttgctgagaaccttactgtatactgggcagacgctagggatacagcggggaaagacagagggcaggcagtaaccatgagacatgattggaaattataagtgctgtgaagtaggctgggtgtggtggctcacacctgcaatcccagcactttgggaggccaaggcgagtggatcacttaaggccaggagttcgagaccagcctgggaaacatggtgaaaccccgtctctactaaaaagacaaaattagccaggcgtggtggcgggcgcctgtaatcccagttactcaggaggctgaggcaggggaatcacttgaacctggaaggcagaggttgtagtgagccgagatcacaccaccgcactccagcctgggccacagaatgagactctgtctcaaaaaaaaaaaaaaaaaaaaagtgctgtgaagtaaacaggcaggggctgagatgggaatgaaggagggactgtgggatcaagaaacataattctttgagaacataatgtgaaataatataaataatatcaacctcaagagaaatgtagaggaatactatgaattgcagctggaatctgccctaaatgtacatttcttcttcctggtgtttgtgacaatttgagttggggttttcttttagtcacagctgaaggcatcctgatgtgctagcataaacaagatgagtgtcttgcttttgatgcttttagctactcaagccagtaaattatcattcttgtttgaactgtgtgagaggtggtcaagttcaacatttgaagggagagttgagagatactgagtgggagagagggataggaaaaacatgccttctttctgtttaggtttctaaggtgataggagataagcctggagctgctcgtggtcaccttgccaccatggggggagaacctgccagaaaatgaaactaaccaaaaaggaagctgagctaagaggagtgaccagattactgacatgtctcttaaacacctggatccatctgttcctgaaggcaaaactgttcaattacataggctaataaattccctttcttccttaaacaaacagaatactcttggctggaaatgaatctctatcttataccagaaattatttaaaaatccagatggatcaacagccgggcacggtggctcacgcctgtaatcccagcactttgggaggtcgaggcaggcagatcacgaggtcaggagattgagaccatcctggctaacacggtgaaaccccatctctactaaaaatacaaaaaattagccgggcgtggtggcaggcacctgtagtcccagctacttggggggctgaggcaggagaatggcgtgaacccaggaggtggagcttgcagtgagccgagattgcgccactgcactccagcctgggtgacagagcgagactccgtctcaaaaaaaaaaaaaaatcctgatggatcaaagttttaattgtgaaaaaaatcgtaaaagtactagaataaaatatagcagaacttttttttcataatcttcggggtgaagaaggcctttgttagcatgatagtagatccaaaaactataaaggaaaatacagatagattaaaatacctaaaaatttaaaaactctgtataacaaacataaacaaaattgaagagaaactgggagaaaatattagtcacttatataccaaagtgttaatatgcgtaatatataaggacttgccgttataaatcaatacaaaaaggcttctcaattaaaaatgggcaaaatacataaataggcaattcacagaatagaaaacatcaataaatacataaaaagataatctcacaaccaagaggacatttttacctatcagattaaaattgctttaaaaaatgactaacaccaagtatttgggaaggaagtaaagaacagagaaataggcactcatatacacttccaggagttgtgcaaattgtttcaccccttttggaggactatttagaaataactatgaaaaatttaaatgtaggtgttctgtgatcccacaagtatacttgtaggaattcattttgtacatatgtcaaataataaatatccaatgatggaaaagaaaatgaaagcaacttaaatatccattaacagggattggttaaacaaattaaagaaaccctagcatgaaatattacacagctgtgaaaaatgaagatacctatgcatgtatatatttttgtgtaatatgtacaatatgtatatattttgcattatcatgggaaagtatccacattatatcaagtgagaaaagtaacttcttaaaattatgtttgcatgtggttatgccatatataccatacatatgtgaatatatatacatataaagtcagtttcataaaaacagaaagggagatttcttatttatagaaaaagtatgaaatctttggaatgaagttttttttttgagatggattttgctctcgttgcccaggctggagtgcaatggcacaatctcagctcactgcaacctctgtctcccagcttcaagcgattctcctacctcagcctcccaagtagctgagattacaggtatgtgccaccacacccagctaattttttatttttatttttagtagagacagagttttaccatgttaatcaggctggtctcgaactcctgacctcaggtgatccacatgcctcggcctcccaaagtgctgggattacaggcatgagccaccacactcggcctggaacaaagatttacagggcactaaagatttcttcatttttgtatcatctgagttattcacaatgaatattacttcaatcatgaaagaagccacaaaagattaggagaaatacctgggcgataactttaaaatataatagcacagaagaaggctagtgagacatagccccatatattgacagacgttccagctgatacagaacttctggcaacccattggcaacatactcgaggtcacagaaatcctctccctatgaccccatgacctcactgccaggatttcacctgggaaatagttagacactcatccctttcataaaagggatgttccatactatatatatataaaagtcaaaagcggccaggtgtggtggctcacgcctgtaatcccagcactttgggaggctgaggtgggtggatcacgaggtcaggagatcgagactatcctggttaacacagtgaaaccccgtctctactaaaaatacaaaaattagccgggcgtggtggtgggtgcctgttgtcccagctactcaggaggctgaggcaggagaatggcgtgaacctgggaggcggaggttacagtgagccgagattgcaccactgcactccagcctgggtgacagtgaaactccttctcaaaaaaaaaaaaaaaaaaaaaaaaagtcaaaagctagaaacaaccaaaatgtccaacaagggactggataatatgctggctgaatatatataagctacgtgaaactgcaaaatatcaggttgttaaaggtgacttaatgatatgttaaatagctgacactcattgctataaaaatgtagtgcatccatggtccgcatgcccagccatggcaggtaggttaagttcagccctttggaaagcaatatggcaacttgtgtgagtaatcaggaaaatggctggaaccttggttcccatcattgccactgtgggaattttactttgaggaataatcaccccaaagggagagaggaagtgagcacggacatgttcattataacattatttgtaattgggataactggtgaaaaacccatgtcagtcaaaagcttaaagaagaatctaaatggagaatggatttgtaaattacaccttctcagtggcatatcattatccttaataatgataaaagtgtatggggacaatgacaatgctcatggcataatgacggcaaaaacggtctctgcattgtgattacaatgaaataaacttatatttgtttaaaagatttgaaaggaaatataaaaaataaaaacaatatgacttctaaggatggccaaattgtcagcgatggcttttatgttttcaacccaaaatttctgacaactaaacctatggatatgggatatagatttaaaaaaccataaagaggccaggtgcggtggctcacgcctgtaatcccaacattttgggaggccaaggcgggtggatcacacaggagttcaagaccagcctggccaggatggtgaaaccccatctctactaaacctacaaaaattagccaggtgtgatggcaggtgcctataatcccagctacttgggaggctgaggcaggagaatcacttgaacctgggtggcagaggttgcagtgagccgagatcacaccactgcacttcagcctgggcgacagagtgagactttgtctcaaaaaacataaagaaacacacccaagaatgactggtgagtctctctgagctgcagaattacagggaatttgtcttttatttcatacttctttacactttccaaattatcctttatgataagcatatggtatttcactaaatttttttctgttataaaaatatatggccgggcacggtggctcatgcctgtaaatcccagcactttgggagactgaggtgggtggatcacgaggtcaggagttcgagaccagcttggccaatatggtgaaaccccatctctactaaaaatagaaaaattagctgggcatggtggtgcacacctgtagtcccatctacttggggggctgaggcagaagaattgcttgaatctgggaggcggaggttgcagtgagccgagatcttgccattgcactccagcctgggtgacagagcaagactctgtctcaaaaaaaaaaaaatatatatatataattattaaatgaaaaataatactatgttttaaaaatatgactaaaagtctccccttgggaggtggggcttacagtgagccaaggtcacgccactgcactccagcctgggcaacagattgagactctgtctcaaaaaaataataacaaaataaaaaatctccccttgggcgtgaataaacagtgatgcttaacaacatgacgcttaatagaacaatcactttgtaggccgggcacgggagctcacgcctgtaatctcaacactttgggaggctgacggaggaggatcacatgaggccaggtgtttgagaccagcctggccaacatggtgtaaccccacgtctactaaaaataacaaaaattagctgggagtggtggcaggtgcctgtaatcccagcttcttgggaggctaatgtaggagaatcgcttgaacccaggaggtggaggctgcagtgagctgagatcatgccactgtactccagcctggtaacacagcaatattctgtctcaaaaaaaaaaaaaaaaaaaaaaaaaaaaataaataaataaataaaagaacagaacaatagctttgtaaagcatagatcctggaaacataataaacagaaacaataggacattaaaaatgtctataaatatgtgaaacatttatatttatatccatatttatatgaaacatatttattgtttaagccaactgcagattctgatatttgtagcttaaagtttcaaaggaaactaaaaatgttactttaaagggttaatctttatagctgtcttcccccattgaatattcaggctccagtttaagtttcttttttttttgagacggagtctcgctctgttgcccaggctggagtgcagtggcgcaatctcggttcactgcaagctccacctcccgggttcatgccattctcctgcctcagcctcctgagtagctgggactacaggcgcccaccaccacgcctggctaatttttgtatttttagtagagaaggggtttcaccttgttagccaggatggtctcgatctcctgaccttgtgatccacccacctcggcctcccaaagtgctgggattacaggtgtgagccaccgcgcccagctcaggctccagtataaggaaggatgaatcagtttaagaagcttggagagagctgttcttggtgaaggtcccagatgaaatggcatcccttttggaccactctctaactataccacgatctagggacatggcagggtggaggaaatatgcaagggaagcccccagaatgatcagaacctgtcgcagttagtgaaaaactgtgccaccttccctctagggaacaaaggaacaaaccatctcaacatatggcgccagcatccttctctggggagttcctagtgttgatgaagagcagattgctgaaaggccatttatgcacctggatccatctgttcctgaaggcaaaatttttcctagggttcctagtgttgatgaaggtgggatggaacctaacagcaggacagccagctcatcacacactcaggttgtctaatcagcatgggttctctgatgatcagcaagctgtgtgccccaagcaaaggctttctcaaaatcatcacagatgtaggcattctggccagtatgaagcctctggtgttcagtcaggtgtgaactccagctgaaaccctctccacactcctcacatgtgtagcgtttgctgccagtgtggaccttctgatgttggagaaggtgtgagatctgggtataggttctcccacagtcactacacttgtaaggcttctctccagtgtgaatcctttggtgttggattaagtggatgctctggttgaaggccttcccacattccttgcaggcgtagggcttctcgccggtgtgaatcttctgatgttgagtgagggatgagttgtgactgaaggttttcccacattccttacacttatagggcttctcgccagtgtggatcttctggtgctcaatgaggtgcgtgctctggctgaaggctttcccacactctctgccctcgtagggcctctctccagtgtgaatcctctggtgttgaatgaggtgggagatctgggtataggctttcccacacactttacattcatagggtttctcccctgtgtgaatcctctggtggtgtgtgagggaggagttctggctgaaggttttcccacactctgtacatttgtagggcttctcaccggtgtggatggtctggtgctgagtaaaggatgaggtgtggctgaaagccttcccacattcgttgcatacatagggcttttcccccacgtgagtgctctggtgcctcatgaggtgggaaatctgcgtgtaagccttcccgcactcgtgacacgcgtagggcttctcgccagtgtgaattcgctgatgctgggtcagggacgagctgtggctgaaggctttgccacaatcagtgcactcatagggtttttctccagtgtggactcgctggtgctcagtcagggatgagctgtggctgaacgttttcccacacttgttacatttgtagggtttctcccccgtgtgggtggtctggtgttgggtcagggaggaggtgtgacagaaggccttgccgcactctccacattggtagggcttctcccccgtgtggattttctggtggcgggtgaggtgggagacctgcgagtagaacttcccacactggccgcatttatagggcttctccccggtgtggcaccgctggtgtttgatgagggatgagctctgtgtgaaggccttcccgcagtccttgcctttgtagggcttctctccagtgtgaatcctctgatgctaggtaagcgaagagctctgagtgaaggtcttgccacatgcatggcaggcatagggcttctcgcctgtttggatgatgtggtgctgaatgaaatatgagctgttgctgaacgccttcccgcagtcacagcacctgtggggcttctccctggtgtgaattcgctgatggagaatatagtccgaatggtaaatgaaggctttcccacattccgtgcagttaaatggtttcttctccacgaacgtcctttggcgtttcaagctcttccagggcctgccccacttccggggcctgtctccaaagggcactcgttgcttcctgatgagggcagaggcctgccggaggcttctcccaagctcgttacacccaaggcctctctcccccgaggtgtctcccttgggagtagcaaataaacacctcaaatgcctctcctgctttcttgcatcctccgaccgatagtgacatgccaagggtttccccacctgggcatctccaagcatggcccttaaaggtccctctactggggaagctgaatcttcagaaatgctcttttttcgaggtgtctctcgaatagtcacagagcttgtctccgagtctgaaagaaatggaaaataccaataccacctgtcccaggacaaagcaagctgattacttggaagtggcagtgtaaacctaaaaaaaaaaaaaaaatttcaaactcgatgttgctactttgtttgtttctttcttcttttttctttttttttgagacaaagtcttgttctgttgcctaggctggagtgcagtggcaccatctccacctcccggattcaagcaattctcctgcctcagccccctgagttgctgggaccacaggcgcccaccaccacacctggctaatttttttgtatttttagaagagatggggtttcaccatattggtcaagctggtctcaaactcctgacctcgtgatccacccacctcggcctcccaaagtgctgggattacaggcatgagccaccgtgcttggccgatgttgctattttgaaaggcatggtgtacgtagatagattcatgttctgacatggaaggatagtctcaatacactctaaaaatgaagacaaccaagttctaaacagtttatgtacacagagttgagtagctatgctatagagtacattttttttacaaatcaataagaaaaatgatagaaaaaaatctaagaaaatagagaggcgagaatatgagtagacaattcacggaagaaaaataagaggctgataaatacatgtatagatgctgaacatcagcaatagttaaaaaaatcaaatcattaggatgctattttacccattttagattggaaaatattaaagatatccagtgttgccaagggagcatggcacagaccttctcacactatgtttgtgggaatgtgcaaggaaagagtgaacagaaggtccatctcagttttttttgtttgtttgttttttgtttttgagatagagtctcgctgtgttgcccaggctggagtgcaatggcacgatctcagctcactgcaacctccatctcctgggttcaagccattctcctgcctcagcctcccaggtagctgggagtacaggcatgcgccaccacacctggctaatttttttttttttttgtatttttagtagagctggggtttcaccatgctggccaggctggtctcgaactcctgacctcaagtcatccgcctgccttggcctcccaaagtgctgggattatagacttgagccactgcgcccagcccatctcactcagtctttgtttatctctgcagatatggcaatgacccttggccagtctctgggaactaaactcctgggatgtttacacaggtgctgggtaagatgttcttccatatgctcaagaccacgggtcaagatgtactaggctgtcagcattgttgactgtaaatatgaagatgcatgatgggcacctggtacctggattggagttctcactctgttcatgtagcaggtatgtgcatacgtgaccagctctcttcaagaactctggactataagactccaagtgggcttcctggggtggagacacctcatacatgtgtctgtggttttgcattagtggaaaaatgcacgtccatgtgacccacacagggaaagggagggctggaaacctgtgtatgacctctcttgcctttgttagttcctactgttcctgagttacaaactttgctgtaaaccgtcaatacaactcgccaagtcatgtgactccttccggaaaatcgccaaaccagtgggtggttgtgggacccccaaaacagagacatgacaactaaatgctatgtgagattcctgaaattatccttttgtcattggattaggcaatggtatcttagacatgatgtcaaaaatcacaaagcaacacaagcaaaatagatacattggacactgtcaaaattaaaacctaggccaggcacattggctcacacctgtaatcccagcactttgggaggccaaggtgggtggatcacttgagctcaggagttcatgaacagcctgggtaacatggctgaaccctgtctctaccaaacatacaagaattaggtagcgatggtacacgcctgtggtcccagctacttggaaggctgaggtgggaggatcaacaaagccccggaagttgaggctgcagtgagccatgattgcgccactgcactccagcctgggtgagaccctgtctcaaaaataataataattaaaaatttaaacctttgtgcttcaaagacactagtaagaagcaaaaagacaactaatagaatgggagaaaattttttccaatcatatgtctgataaagaacttgtttctagaatacataaagcatacttacaactcagtattttggtttttgagacggagtctcgctctgtcacccaggctggagtgcagtggcacgatcccgggtcactgcaacctccgcctcccaggttcaagtgattctcctgcctcaacctcccaagtagctgggactgcaggcacgcaccaccaggcccagctaatttttctatatttagtagagacagggtttcaccgtgttggccaggatggtctcgatctcttgacctcatgatccacccacctcagtctcccaaagtgctgggattacaggtgtgagctaccacacctggccacaactcaatatttttaaaaactcaattaaaaaagggcaaagttctcaatagtcatttctttaaagatatacaaatggccaataagtacatgaaaagatactcaacatcattagacatcaaggaaaatgaaatgaaaatcatgagattccacttcacactcactagttatataataaaaaagacagatagtaacaagcgttggtgaggatgcggagaaatcagagccctcacacactgctggtgggaatgtaacatggtacagccactttggaaaatagtctggcagtttctcaaaaggttaaacatagaattaccctatgattcaacaattccattcctaggtatctacccgaaataaatgaaaacatacattcacacaaaaacttgtgcatgaatgttcatagcagtatgattcataatagccaaaaagaagacataactcaatgttcaccaactgatgaataaaccaactgtggtacattcatacaacaaaatagtattcagccataaacaggaatgaagctctcatacatactgcaatgtgaatgactcttaaaaatattatgctaggctgggcgtggtggctcacgcctgtaatcccagcactttgggaggctgggcgggggtgggggggtggatcacgaggtctggagttcgagaccagcctggccaccatggtgaaattctgcctctactaaaaatacaaaaattagccaggtgtggtggcaggtgcccatacccagctacttgggaggctgaggcaggagaatcacttgaacccgagaggcggagcctgcagtgagccaagatcgtgccactgcactccagcttgggtgacagagcgagactccgtctcaaaaaataaataaaaaaataaaaaataaataaaaataaatgaataaaaagaaatgatgagcagaaagcaaaaccatctggaatttgtggagggaatggatttttttttggagctagtgggtttgttcatggaatgtccattaattacatatgtgccaaccacggtgctgtgagtaggtgaccttttgctaaacaagatatctggttcttgtcctcagagaggggggagaggcaggcttatattcagacattttggacatatcctacttatctctttagcatccctgtctttgaacaaccactgctccccttttcctatagtcttggtggggctgtcacatatctccccaacccccacctcagcaatgggcatcagacttccgactggccaatcataataccccgttcctcgggccataataattggttcatcatccaaagggacccagtcagagtcttccccgagatgagtatatggggttattaggcagaatataagtttgagactgtgggtagccacgttgattgctacttggaaaggtctgtagacaaaacgaagctagaaacagacagaatcaacacatgtggaaagcgaaggagggggaaggtgggggttgtggggagagagagagagagagagaacaagtaagccctgacaataccatttaaggccttagattcatgtatgccgaaagtcttgcactgcaatacttcctagttatatgggtcaaaaaaaatctaatttttcttaagctattttgattctttacatgtgggagtcctgatatatcagataataacaattattattattgcaatagagaacattcattaaatgctgactacctgccagatactgttctgagcttgttccgtgtattaagtaatttcatcatccaaacatttcattgaggtgggtactattattctccctatttaataggtaaggacggccgggcgcagtggctcacgcctgtaatcccagcactttgggaggctggggcgggtggatcatgaggtcaggagttcgagaccagcctggccaacatgatgaaaccctgtctctactaaaaatacaaaaaattagccaggcacggtggggggcacctataatcccagctactctggaggctgagacaggagaatcacttgaactcgagaggcggaggttgcagtgagtccaggttcaccactgtactctagcctgggcgacagagcaagactccatctcaaaaaaaaaaaaaaggtaaggaaatggaggcaccaatagattaagtcacttgcccacaatcacgcagtgggagaaaggggatttgaactcagagtctacactcttaagtacaacatgcacaagtgcagtaatagcaccttgagctaggagctgtgaaaacgctgagaagcggtggcctagttatcacggaaggccacttggaggaggtgacctgtaagcttcatcgtgaaacacatgaaggtgcttgccaggcagaaaaagcagggaagggtattccagacagagggaacagcatgtgtgaaggcccaaaggtggcaacacacattcaggttgaggtacggacaggtgcttcagtgaggtcagggcatggtgtacaatcaggggtggatggtgaagatgaggccagagaaagcacaggctgagtgacacagggcaccgagtgccaggctgaggggctgggacttcatcttgggggtactggggaagcaggggagggtgtgagcaggggagggagggggttagctctcagtatggaaggatcccctggggcggtgtcaactggaggggtaagtctgggggccaggaggctggggtgagggtccaggggagagaagctgaggcctggccaggggcaggagggacaaggctggggactgatgggctgtgacgggacaaggggagggtcgggtgagaattataacgatgacagccattgaagccactaccgactctgtgccaagctctgggctctgctctgtatctgttaattcatttattcctcccaatcctagacactcatgtcacctccttttcacagatgaaaaaaatcaaagcacagagaggctaagtgacttgcccaaggccacacagccaggaagcaatcagctgggatttgaacccacacaacccgactcccgagcccacgatgatcacccgtgtgttccactgcctcacccctgagtgaacctcactgaccatgagagatggggtaggaagagggctcacacctgctggatatcctcacccacctgggcaggtaactcgccgggcctctctctcctgcctcagctcttcccctcgatccacacgggagatcacgtcggatttggacccaggcagccctgcccctggggaaagatacaagagttggctgtgggtgccagaatcacagggaggtctacagggaaggtgcacgcactgagcgcctaatgattggacgtacaaatggccaacgccaagacttatttgttgtgtgcttagcacactgcagagaggctgagccaacttatttgttgagtgcttaggacactgcagagaggctgagctctgacaaagctgtttaaggctccgcgtctgtgctgttcgagttaactgcactgtgacagtataagaaacatcgtcttctgtgtttcgaagacttactaaagaaaaaaacagtaaaatctctcaatcatttgttaattgattattatttcagtgtgtcaagatgataagattttagatagcttgaggtgaataaaatgtattattaaaattaatttcatttgtttcttcttattttttttaacgtgaccgccaaaaaatgtaaaattacctaagtgggttgcatcttatttctgatggacaactctgtttagattcattgatgtccaaagcttccatctcaagacttctaaatacataagttaaaacattcactttttttttttgagacaggttcttgctctgttgcccaggccgaagtgcagtggcacaatcatggctcactgcagcctcgacctcctgggctcaagtgatcctcccacctcagcctcctgaatagctgggactacaggcatgcaccaccatacctggctaattttcaaattttttatagagatggggtctcactatgttgcccaggctgatctcaaattcctgggcttaagtgatccacccaccctgaacatttccttttttcttttttagatggagtttcactcttgttgcccaggctggagtgcaatggtgtggtctcggctcactgcaacctccgtctcctgggttgaagcaattctcctgcctcagcctcccaagtagctgggattacaggtgcctgccaccatgcttggctaattttttgtatttttagtagaaacgggtttcaccatgttggccaggctggtctcgaactcctgacctcaggtgatctgcccgccttggcctcccaaagtgctgggattgcaggcatgagccactgcacccagtccagacattttcgttttgatgaaactgtcttgaatcactgtagacaaacataccatccctgattaaaacatgaagtaattacaatagttagggtgatactaaaaagtgaatgtctattaagcgcagattacatgccaggcatgtttctaagctggttaaatgtagtacctcattttcacccttcaggcaggaaaccgaggcacagtctagtgttgtgtgagcaggaatggaagaaacacgcaacactgcaggaagtcacagagggtgcagaaatcaaaggaaacttcctggaggaggtgagccaagaggtgactagactaggggtgaggaggagatgaattttggttcaacaaacatgcctggccaggcacggtggctcatgcctgtaatcccagcactttaggaggccaaggcgggtggatcacgaggccaggagttcaagaccagcctggccaaaatggtgaaaccctgtctctactaaaaatacaaaaattacccgggcgtggtggtgggcacctgtaatcccagctactcaggaagctgaggcagagaattgcttgaacctgggaggtggaggttgcaatgagccgagatcgcgccactgcactctggcctgggtgacagagcaagactctgtctaaaaaacaaacaaacaaacaaacaaacaaaaaaacatgcccaaaggcctcccggtctccctgtgccactccctggcactgctggagatacagaaatgatctggacactcccctgtgcttgagggcgtctcaggctgaagggggaggcagacctggacacagttacaatccagggtgactccgggactcctttcctacaaggatcctgtcctccctctgtcttaggtgcccaggcctatggtcacagccttcatctctgataatgacacaaatctccacatcttggtgtcagacaccccctcccacctcccagcctcccggggactttctccactatactttatcttattattttaattttattttttgagacaggatcttgctctgttgcccaggctggagtgaagttgcacaatcacaacccactgcagacttgatctccctgggctcaagccatcttcccacctcagcctcccgagtggctgggactacaggtgcatgccaccacatcccgctaatttttacgttttttgtagagacaaggtcttgctatgttgcccaggctggtctcgaactcctgacctcaagcaatcctcccacctcagcctccccatgtgctgggattacaggcatgaaccaccgtgcctgacctttctccagttcttgactccagctatccttccatggacaaggagggtgccctagagcctggcttggtggctgggtgaaccatgaggtctgcctctaactgccacagtcaggggacagaggagcagggacccaggacagctaatcttctgatactgcagccccctcaccatgtattgcctcccatgatttcaccttccactctccagcctggcatttaccacccatccctgtaaccactcccctgcctgcacccctacctgccctgtccctcttggcctgcactgagctcaccaggtaacagccctgctgtggttagagccaaacagcctctgacctgggtgctggtgcccaagaaggcattgccactaaggtcttttttttttttttttttggagacagtctctctctgttcccatgctggagtgcagtggcacgatctcagctcactgcaacctccgcctccctagacaagatcgtgccactgcactccagcctgggcaacagagcaagactctatctccaaaaaaaaaaagaagaagaagaagaggatacacagacacggagggaagaggccacatggcacagacgcagagaaagaagggaggcgggtaccagccaagaaatgccaggaggcaccaggtgttggaagaggtgaggaaggaccctcccctggagcctttggaggcagcgtggccgagctgtcaccttggttttagactctggtccagaatcatgagagaactgatggctgttgtcataagccaccacgtttgtggttgtgcattgtggcagcagcaggatacactcccccatgcccctactgctcgtgcccgtgagcagacgcatgtgctgtcacagatgccatcttaaagacaaccttctggccaggtgccgtggctcacacctgtaagcccagcgcttttcaaggccgaagccagcggatcacttgagatcaggagttcgagaccagcctgaccaacacggtgaaaccctgtctctactaaaaattacaaaaattacccaggcgtggtggcatgcgcctgtaatcccagctactcgggaggctgaggcaggagagtcacttgaacccgggaagtggaggctgcagtgagctgagatcgcaccactgcactccagcctgggcaacagtgagactgtctcaaaaaaaaaaaaaaaaaaaaaaaggaaaaaaagacaaggccaggcgcagtggctcatgcctgtaatcccagcactttgggaggccaaggtgggcagatctctgagattaggagttcgagaccagcctgaccaacatggagaaaccctgtctctactaaaaatacaaaattagtcggatgtggtggtgcatgcctgtaatcccagctactcgggaggctgaggcaggagaatcgcttgaacccaggaggcggaggttgtggtgagccgagatcgcgccattgcattccagcctgggcaacaagagcaaaacttcatctcaaaaaaaaaaaaaaaaaaaaaagacaaccttcctgtgatcaccacagagtgaggcagtgggggaacagaaagtggtgacactggggagagtgtcagggccaggacacatacgggtatgaaagagatggtaaagacagtgccctgggctgggtgtggtggctcatacctggaatgccagcactttgggaggctgaggtgggcagatcacttgaggtcaggagttcgagacctgcctggccaacatggtgaaaccccatctctactaaaaatacaaaaattagctgggtgtggtggtgcatgcctgtaatcccagctactcagaaggctgaggcaggagaatcgcttgaacctgggaggcggaggttgcagtgagcagagctcgtgctactatactccagcctgggagacagagcgagactccgtctcaaaaacaaaaaaacaaaaaaagtcagtgccctggactggcctggcctggtctctgggtgggcaggggtctgtctctgagatgggagacctgaaggaggaatgagtttgggggtgacatgacccgctcaggggagacagggagtgtggggtcctgagccttccccatggtggtattgtggaggccacaagctatacaaggttgaaactcatgggacacattgaagggacaccattgtggatgtgtggaaaagggtgaacacagccggcctgagatgctccctttggaaagtcctgatggccaggtagaccctaggctgaggtccagcaacctggactttaggagggttcccagaatttcctaactgatgtggggctcactagagcctcagttgcttgtggttttaattttaattttaattttttttagagataggggtctcactatgttgcccaggctggactcgtaatcctgggctcaagtgatcctcctctcttggcctccgaaagtgctgggattacaggcgtgagccactgtgcccagccctaaactgtttgtgcaaacaccatggtttatgctgaacacctgcttttttcccaggagtctaaaatttgggtacattttagtagagggggctgtgtgagcaacccccaggaaaaaccctgagcacagccgggcacgatggctcacgcttgtaatcccagctcgtagggagacagaggctggaggatagcttgagcccaggagttcaagacttgcctgggcaatatagagagatcctgttaaaaaaaaaaaatgctgagccctgagtctctggtgagcttctctggtgataacatttcccatgtgttgtcacctcttgctgctgggagaattaaaccatcctatgtggctccactgggagaaggttctggaagcttggcctggtttctcctggatggcgccccgggtgcccttcccctttgccagctgtgctgtctcctttctctgtaataaaccatcactgagcgtttaactaagggctgagtccctggcacccgctaacaaatcagtcacctgtggtggtcttggggaccgaccctgatggagaagtttgggccacgtttttaatgagaccacatttttttttttttgagacagagtcactctgttgcccaggctggagtgcaatggcgagatctcagctcactgcaacctccgcctcccaagttcaagtgattctcccacctcagcctcctgagtagctgggattacaggtgcccaccaccatgcccagctaatgtttgtatttttagtagagatggggtttcactgtgttgtccaggctagtctcaaactcctgacctcaaatgatctggccgcctcggcctctcaaagtgctgggattacagatgtgagctactgcgtccagcctaagccacatttttgatgagtttgtccagagaaagtgcgtgagtgaggagggctgaggatggagacgtcacatcaccacagctacttacaggggaacataaagacggagaacgacaggtccaggaaggtgggaagtgaaaccagcaagggggctgtgctgaggtgcaggggcaagacgaggcctgggcagggctggggccgtggggatggtaaggagggtgtaggagggcagggctgtggcctgaggggtcctgtggacaaggggaagtaggggatgttgtgagcagaattgctggcatccccctaaaatgcataagttgaaacctagtccccaggtgatggtgttaggagctgaggccttttggaagcgattaggtcatgggggtagagctctcgtggcaggggttagtgcccttacaaaagacaccccagagagctctcttgctcctccactctgtaaggctatagagagcagcctctgtcggccggatgtggtggctcatgcccgtaaatcccagccctttgggaggccaaagtgggtggatcactgaggtcaggagttcaagaccagcctggccaacatggtgaaaccccctctctactaaaaataccaaaaaaattagctgggtgtggtggcgggcaccagtaatcccagctatttggggaggctgaggcaggagaatcacttgaacccgggaggtggaagttgcagtgagccaagattgcgccactgcactccagcctgggtgacagagtaagactctgactcaattaaaaaaaagaaagaaaaaaaaaaagagagaaggcgccgtctatgaaccaggaagcgccctcaccagacaccaagtctgctgtcgccttcatcttcgacttcccagcctccaaaactctgacataaatttctttctttctttctttcttttttttttttgaaacggagtctcactctgtcacccaggctggagtgcagtggcgcgatctcggctcactgcaagctccgcctcccgggttcacaccattcttctgcctcagctcccgagtagctgggactacaggcacccaccacaatgcccggctaattttttttatttttagtagagatggggtttcaccgtgttagccaggatggtctcgatctcctgacctcgtgatctgcccgccttggcctcccaaagtgctgggattacaggcatgagccaccgtgcccggccaactctgacatacatttctgctgttagaagctacccagtttacagcattttgttagagcagctcaaactaagcaagtcagggccgaggatggtgcccgggggtctggtctggagacctggggggatgtggggccaaccagaggtggggacctggaggaagagaagcaggacggtgggtgaactgagctcggcgtggggtggatgtgaggggtgggaggtggggagggctatgcctggaggcaggaaggtgggcaagtgcaggatctcggagacacactaggggacagcgtttatatgctctggggagaagatgccgaggtcagattgggacctgttgattgggaacatgtccgggaggcgcttggagcctgagattctggactgggcgttccagtgtggagcctgaagtccggggacagggaggtcaccatgtgtggaagggaaagcgttagaagaagctggatgaccaggcacggtggctgacgcctataatcccagcactttgggagtccaaggtgggcacatcacctgaggtcaggagttccagaccagcctggccaacacagtgaacccgtctctactaaaaatacaaaaattagccagcatggtggtgtgtgcctgtaattccagcaactcgggaggctgagacagaggaattgcttgaacccaggaggtggagattgcagtcagctgagatcacgccactgccctccagcctggtgacagagtgagactccatctcaaaaaaaaaaaaaaaaaaaaaaaaagaagaagaagaagaagctggggacacaggctgaagagtttgcgggactcacattttacaggacaggccaagggacttgggccctcctggctgctgggactccaggcagaaagagaggaagggagaggcccccagaaagagaggaagggagaggccaggcgtgagggaccagtgagaggagcacagaggcccccagatggcaggggatggacatgaatgagaagagggtgccaggaggcatcagagagagggctgggggcatcagagagggtgccgggggcatcaggcctcccccgggggagggcagagggaggggcctcacccagggagagaaggttccagtagttctccagcatcacgtctccagcaaactttcaccacatcaccagatttagtctggccctgctgtgggcttttttccagtgatcatgagggacccaacagctgggcacagaactcagatttgagattggaaaagacggggactctactaaggtggataggatggaggctactccctcctcctgtcattcactcatttatccattcattaattcatcccaccaaccttcccaggagtttctggtgagccactgcccatgttgggcaacgctggcggcacagagtctaggccgagtcctgacactgcccatgaatttcagcccctcatgctccctgtggccccagaagatccttctacacccagagcttcccctccccttccttgctcacagccctcccgtggctccccagtggccccaggacagagtctcagcccctctgataccatgcaggacttgccccactcatccctacagcctcatctctcctcgcatttgcagagactcctcttttttgtgcctccatttccccatctgtagaatggaattgtaataccatctgtccgtcacttcagggccaagtgagaaagcgcatcctaaataatgaaacaggattgacgtcttctcctgttgatgattagcatctgtttcaactctctgtctctcactcccgaaccttctgcactttctcctttaggaaaagactgtgaccagcttcacaaaaggcagcaaaggactatcagagaaagagaactccgagtgaggggtaagcagcctggccacagggaaggggctgggggtggagatgcctgcatctgagggaggaggggctgggggcctggactcctgggtctgagggaggaggggctgggcctgggactcctgggtctctgggtggtgatggagctacaggaggtcgtggtgcagttctctgccattgctgacccctcctttcctgctccatcgtgcaggtctggcctaggcccgggatcggaccaggctccctcaggaccccatcctttcctgcccggaccgtgaattcatctccttgaagccataacgtccgagctgctggtgcggggcagccctggccctaggcttcctacccctggaagcgagaggatgagaggaggccggcccagctccttctttcagggtggggggcattcagcctccactgtgtctgtcttttcttccctggggctccccctcgaggcgaggggccatgcatgtctgggggacccctgccccccaaaaccctctgtctgtctctgtctctttgctgtttgtccaagactcagtgtcccgacccttgttctcgccgtgaatgtcaatgggccaatcctctctgtcctttcagacacacacacacctgtgtccaccccttctgttcgccacaccctgcgtctggccggtccccccactgctgctgctatcaacgccagaataaacacactccgtgggtctcactccaactgggcctcctgtcctctctgagactgggaaaccggattggaacatgctggctctgcaagcagacaaatttgtgtttctttcaatgactgggcaacttaatgatctctctgagcctcagtttataaaaatggtgttagtcaggatcattgtgagtacagaacacaaaattcaacccaaagccataaacagaattgaaagacctctgtccatggaaagcctatgaacacattgaacacagagggacttcaggcatggttagatccagctgttcaagggactctcacttctgctttcctctttttttttttttttaatggagtttcactcttgttgcccaggctggagtgcagtggtgtgatctcagctcactgcaacctcccggtttcaagcgattctcctgcctcagcctcctgagtagctgggattacagccgctcgccaccacacctggctaactttttgtattagtagagacggggtttcaccatgttggcaggctggtctcgagctcctgacctcctgtgatctgcccgccttggcctcccaaagcgctgggtttacaggcatgagccaccgcgcctagctattggcttctctctcaggtaggtgtttgcagtggcaatgagatggtcacttggagctccaggtgtataatgctgtatctgttatgataccttcggctgaaaaaaaaaaaaaaccttcccaactgaaagagaaagatttttttgcatgtttgcatatcaaatttttcaaagacagtcccagggttggttcagctgctcaacaacattaggctctggttggcatctctgagactggtgttcgttcccctcctgagtacaaactgtctatagcagcatcatgttctcacacactggcatctaaatcaggcagtgtagaccggggcctccccttctgtgttccccttttttcctcctcagaataattctccttatttctctcttgccagaacccggctgtgtggctaccccgagttgcaaagcggtctgggtagtgaacatctgtcatttccagttcccatggtggggtgcagctttgcctagaggaagcacggggaggggaactattgttgggtaggaaattaacaggatctgctgccattgcaagaaattaacaggacttgtaattgccttcagagcagataacttcagaggaaacaatgtgagaatcagctggctcccagctgctgcgtcattcaggaacaggattctgattggtccagcgcagaccttggagacaccccgggccaatcattgggtccagtttggagcctactcttgggcccgcctcctgcctttgctgactcctcctcctcctcccctgcccatcttgcccaggattggtccaaagcccctctggacctcatccctttttgctggaaggatgaattcatctcctggaagccatatatgtaggggtcccttgactgacagttccaaatgaatcacacggcaatgggcaagggacagtccctcaaagcagtaggtgtccactacattctaccctcagctacttcacactaattcacatctacattccgggacacaacatttcaaaaactcccactgcaaaaattggtccaatcactgtgtcagtttgctaggactgatgtaacaggttacaataacctagctgaaaacaacagaaatttattctctcacagctctggaggccagaagtctgaagtcaatgtggtagtaaccaccaggcacagtggctcatgcctgtaaatcccagcactttgggaggctgaggcaggaggattgctcaagcccaggagtttgagaccaggtaatatggtgagattctcttaaaaaaaaaaaaaaaaaattggccgggcatggtgatgttcacttgtagttccagctactttggaggtcgaggtgggagtattgctcgagctcaggagttcgagaccagcctgggcagcatagcaagaccctgtctctacaactaatagtagtaataataataatagtaaaattatccaggcatgatggtgctcacctgtagtcccagctactctggtggctgaggcaggaggatcacttgagcccaggagtttgaggctgcagtgagctgtgatggcactgctgccctgcatctcaaaaacatgatgccgtgtgatacagccagatacaagggtatatgctgtaggattccacttttgtgaaattgtagaaagaaaacactaatatgggcggggcatggtggctcacgcctgtaatcctagcactttgggaggctgaggcaggcggattacttgagatcaggagttcaaaagcagcctggcacctgtaatcccagctacctgggaggctgagtaggagaatcgggaggcggaggttgcagtgggccgatcatgccactgcactccagcctgggcaacagagtgagactccaactcaaaaaagaaagagagaaagaaagaaagagagagagagagagagaaggaaggaaggagagagagacacaaagaaagaaagaaagaaagaaagaaagaaagaaagaaagaaagaaagaaagaaagaaagaaaggggccagaggccaggcacggtggctcaccctgtaatcccagcactttgggaggccgaggcaggtggatcacgaggtcaggagttcaagaccagcctggccaacatggtaaaaccccatctctactaaaaatacaaaaattaaccgggtgtggtagcgagtgcctgtaatcccagctacttggaaggctgaggcaggagaatggcttgaacctgggaggcggaggttgtagtgagctgagatcacaccactgaactccagcctgggtgacagagtaaaagaaaagaaaagaagagaagagaagaaaagagaaaagaaaaggctaatacgcaggggcagaaaatggattagtggttgactgggggcagtggcagtggttatggagagactgattactagtggacacaggaaaactttccggatgatggaagtgatcacacaaccgaatacatttgtcaaaattcattgcgtttaaaattggttcatttaaattcttgtacattgttgcaaaatacacataacacaaactttaccatcttagccaattttttttttttttgagacggagtctcgctgcaatgcccaggctggagtgcaatggcatggtcttggctcactgcaacctctgcttccccggttcaagcgattctcctgcctcagcttccagagtagctgagattacaggcatgagccactttcccaggacttagccaattttaagtgtacagttgcattgttgtgcaatcatcacccctactcatctccactctttcctcttgtagaattgaaactgttcccatcaagcaactcccactgccttcccttcccagcccctgggaagcacgttctactctctgggaaattccctatgaatttgactactctaggtacctcatgtaagtggaatcatacagcatctgtctttttgtgatgggattgtttcacttagcatgaatgtcctcaggcttcacccatgttgtagcatgtgttagcatttccttcctttttaaggttaaataattttccattatgggcctggtgcagtggctcacacctgtaatcccagcactttgggaggaagaggcaggcggatcacgaggtcaggaaatcgagaccatcctggtcaacatggtgaaaccccatctctactaaactacaaaaaattagccgggcgtggtggcaggcgcctgtagtcccagctacttgggaggctgaggcaggggaatcacttaaacctgggaggcggaggttgcagtgagccaagatcgcaccactgcactctagcctgggcgacagagcgagactccatctcaaaaaaaaaatccattatgtgtatataccacattttgtcgaaccatttatttgttgatgaacagctgggttgcctcctttaccttttgggtattgtaaataatgctgctatgaaagtgggttgcaaatatctttttgaaatattgatccattttcttgtacacaaattatattttgataaagttggctaaaactaatactcccacctaacataactatctctagtgcaactgcagaagctttcaccccttctgcaaagggagggatcccaaagccacatccaatcctcagaccaagatttctggatattggctattcctttcatcaagggcacatggagtctctcttgatcctgaaaattaatgttaaggctgggcacggtagctcacacctgtaatcccagcactttgggaggccaaggcaagtggatcacctgaggtcaggagttcaagaccagcctggccagcatggtgaaaccctgtctctactaaaagtacaaaaattagcccggcatggtggcacacacctataatcccagctactcgggaggccgaggcagaagaatcacttgaacctgggaggcggaggttgcagtcagtggagattgtgccactgcactccagcctggtgacagagcaagactccatctaaaaaaaaaattaatgttaaatgaaattgtagccccctcagcaacccacccctgtgtataacagtggaggaaaaacaagaaaacaatcacaattctcacttgaaaggggagggaagagaaacaaaatagtatatgccatttgctagacttgccaagactcctgcactttcaagagacaaaaaaccggccttttaaaaaattattgccaagctcggtggctcatgcctgtaattccagcactttgagaggctaagattggaggatcactagagcccaggagttcgagacccagccttggcaacatagcaagactccatctctttaaaaaaaaaaaaaaaaaaatatatatatatatatatatatatatagccaagtgccatggtgtgcacctgtagtcccagctactcaagaggctaaggtgggaggatcgcttgagcccaggaggtcaaggctgcagtgagccatggttgagccactgcagtccagtctggacgacagagacccagtttcaaaaaaaaaattattgaagtacaacatactcacaaagaaactcacaaatacccagtaagtatggatcagatgacagactgagcacaccatgtaaccatgggtaaccagccctgggtcaggaactagaacattaccagctctccaaacccctcatgctccttgtcagtcacttttttgtgttttttttttttttttgagacagagtctcgcctggagtgcagtggcgctatctcggctcactgcaagctccgcctcctgggttcacgccattctcctgcctcggcctcccgagtagccgggactacaggcgcctgccactatgcctggctaatttttttgtatttttagtagagacggggtttcaccgtgttagccaggatggtctcgatctcctgacctcatgatctgcccacctcggcctcccaaagtgctgggattacaggcgtgagccaccgcgcccggccccttgtcagtcacttcttcacctcaaaggtaactactaccctgatttctgacaccataagtcagtttgccttgtttttgatcttaatctgcttggaatcctacaagcatagagacttgtgtgttggaattcttttttttttttttttttttttttgagacggagagtcgctctgtcaccaggctggagtgcagtggcatgatctcagctcactgcaaccttcgcctcccaggttcaaacgattctcctgcctcagcctcctgagtagctgggattacaggtgcgcactaccacacccagctaattttttgtatttttagtagagacagggtttcaccatgttggccaggatggtttctatttcttgacctcgtgatctgcccatctcggcctcccaaagtgttggaattacaggcgtgagccattgcacctggcctgaattgttttattcatcatacgtctatgagatttgtccatgtagttgctgattgttggaggttgttcattatcattgctgtataagagtgtgttatgagccaggcacggtggctcatgcctataatcctagcactttaggagggtgaggcaagcagatatcttgagcacaggagttcaagaccagcctgagcaacatagcaagaccccgtctctacaaaaaaaatacaaaaattagtggggtgtggtggtgcgtgcctatcatctcagctacttgggaagctgaggtgggaggatggcttgagcttgggaggcagaaattgcagtgagctgagatcacaccactgcactacagcctgggtgacagaggacaatcttgtctcaaaaaaaaaagtgtgttatgggaatacataataatctatgtatccattctactgttgattgacatttaggtgccttctgatttggcatgatcacttacagtactgctatatacattgaattttggtgaacatatgtaggcatttctgtatttctgttgggtatatacctagaagtgtaattgctgggtcccagggtgtatgcatggtgtgggcatgttcctctttttttttttttttttgagatgggagtggccaggctggtcgtgacctcaagtgatccgccgcctcccaaagtgttggaattacaggcatgagtcaccattcccagcttcatgttcatccttaatagacactgccaaccaggttttcaaactaattttctccatttatacacccgccagcagtctctgagaatttcagctgctcgccaacatttggtattgttagtcctttcaattttagcaattctggtggggctgtagccgtgttttattatggttttaatttacctttagcccaatgcctaaagaaatttaacaccgttttgggccaggcgcagtggctcatgcctataatcccagcactttgggaggccgaggcgggtggatcacgaggtcaggagatcgagaccacggtgaaaccccgtctctactaaaaatacaaaaaattagctgggcgcagtggcgggtgcctgtagtcccagctactcaggaggctgaggcaggagaatggcgtgaacccagaaggcggagcttgcagtgagccaagatcacgccactgcactccagcctgggagacagagcgagactccgtctcaaaaaaaaaataagaaagaaatttaacactgtttcaaatatttattgggcatatgaacatgctactttgtgaaatgtcaattcacgccattcgtccatttttcgactggtttttctgccttttttaaaaaacaggttagtaggagttatttctttatttttcttatgagtcttttgttagaatacatattcttctcccactctctggcttgtcttttcattctcttaatggtattttttgatgaggatcagtttctattttaatatagtccaatttatcaacattttcctttatagttaaggctcctttgtttctggtttaagaaatattttctggccaggcacactggctcatgcctgtaatctcagcactttgggaggctgaggagggaggatcatatgagcctaggagttcgagaccagcctgggcaacatagcgagaccctatctctattaacacaaacaagtaaataaaagaaatattttcttaccctgaaggttctgaagatactctatgatattttcttctagaagttttattgtttaagctttaacatttagatctacaacacatctggaatcaatttttgtgtatggtgtgaggtagaggtcatatggttatcaactggctcagccctatttatccaaaaagatcatcttttgcttctcactgcactgaaatgttgcttttgtcataaaccaagttaccgtatatgtgtgaacttttcctgatttttccgtcttgttcttttggtctatttgtttttccttgcaagagtatgctgctttaattattattataataagccttgctctctggaaagtactctggctttttttgtttttgacaaagggaatttgttgacttatagaaccgagctatataactagcttcaggcataactggatccaggcactaaaatgaatctttagcaataccgctcatttcccatctgggctttacttttctgtatcttgacttccctctcaggcagaatctcttccctcacggtgacaaacagggcccacagcagctcgaagcttccatactatcattttaacaacctagcttatcattttaacaacctagcagaaaaggggtactgccttcctgaatggtgataccaaagtctcaaggttagctctcattggcccaacttgggtcacatgtccatttctatagtaaccatgtgtcttagtccatgttgtcttgctataaaggaaaacctgacgctgggtaatttttattttattttattattttttttttgagacaggatcttgctctgtcacctaggctggagtgcagtggcgcaatcttggctcactacaatgtccgcctcccaggtacaagtgattctcctgcctccagtgtagctggtatgacaggtgcccgccaccacacctggctaattttttgtatttttagtagagacagggtttcaccatgttagccaggctggtctcgaactcctgacctaaagtgatccacgaggctgggtaatttataaagagaaaaaggtgtatttggcttatgattctgctggctggaagattgggcatacagagaaagtctagagctacttccactcttggtggaaggagaaagaaagcagggatcatgtgacaatagaggaagcaagagaggcaagtgtcagcctctctttaacaaccaactctaatgggaactaatggaggaagaactcactcacccacactcccagggagggcattaatctatttgtgaggggtccacccctgtgacccaaacacctctcattaggaccccatctccaacattggggatccaatttcaagaacgaaatttagaaggcagcctggccaacacggggaaaccccgtctctcctaaaaatacaaaaattagccgggcgtggcatgtgcctataatcccagctactcaggaggcggaggcagaagggtcacttgaacccaggaggtggaggttgcactgagccaagattgtgcaactgcactccagcctgggtgacaaagcaaaactctgtctcaaaaaaaaaaaaaaaaaattggatgggacatacatccaaactactgcacatcataaccaaggtcatgaagtactcaggttggccaggtctgactcttgttctcactctgagatccctggcaagatccagtcaaaaaatgtatattttgcatggagaggagtgataggaaaatcagatgtttaagagaataaaaagagaagctatagattgtgagaaaatcttttcaaaacacctatcagacaaaaagctggtatccaggccaggtgtggtggctcacatctgtaatcccagcattttgagaggctgaggtgggcggatcacctgaggtcaggagtttgagagcagcctggccaacgtggcaaaaccctgtctctactaaaaatacaaaaattagcctggcatggtggtgggtgcctgtaatcccagctactcgggaggctgaagcaagagaatcacttgaacctgggaggcggaggtggcagtgagctaagattgcgccattgcactccagcctgggcaacagagcaagaccttgtctgaaaaaaaagaaaagaaagaaagaaaaagaaaaagagaaaagaaagctggtatacaaagaactaaaacttaacaataagaaaacaaacaacccgctccctctccatctccctctccctctccctctccctctcccatctccccacggtctccctctccctctctttccacagtctccctctccctctctttccacggtctccctctgatgccgagccgaagctggactgtactgctgccatctcggctcacgcaacctccctgcctgattctcctgcctcagcctgccaagtgcctgccattgcaggcacacgccgccacgcctgactggttttcgtatttttttggtggagacgggatttcgctgtgttggccaggccggtctccagctcctaaccgcgagtgatccgccagcctcggcctcccgaggtgccgggattgcagacggagtctggttcactcagtgctcaatggcgcccaggctggagtgcagtggcgtgatctcggctcgctacaacctccatctcccagccgcctgccttggcttcccaaagtgccaagattgcagcctctgcccggccaccaccccgtcggggaagtgaggagcatctctgcctggccgcccatcgtctgggacgtgaggagcccctctgcctggctgcccagtctggaaagtgaggagcgcctcttcccggctgccatcccatctaggaagtgaggagcacctcttcccggccgccatcccatctaggaagtgaggagcgtctctgcctggccgcccaccgtctgagatgtggggagcgcctctgccccgccgccccgtctggtatgtgaggagcgcctctacccggccgcgaccccgtctgggaggtgaggagcgtctctgcccggccgccccgtctgagaagtgaggagaccctccgcctggcaaccgccccgtctgagaagtgaggagcccctccgcccggtagccaccccgtctgggaagtgaggagagtctccgcccggcagccaccccatccgggagggaggtgggggtcagcccccgccaggccagcagccccgtccgggagggaggtgggggggtcagcccccctcccggccagccgccccgtctgggaggtgaggggcacctctgcccgaccgcccttactgggaagtgaggagcccctctgcccggccgcccctactgggaagtgaggagcccctctgcccggccaccaccccgtctgggagttgtacccaacagctcattgagaacaggccatgatgacaatggcggttttgtggaatagaaaggggggaaaagtggggaaaagattgagaaatcggatggttgccgtgtctgtgtagaaagaagtagacatgggagacttttcattttgttctgtactaagaaaaattcttctgccttgggatcctgttgatctgtgaccttacccccaaccctgtgctccctgaaacatgtgctgtgtccactcagggttaaatggattaagggcagtgcaagatgtgctttgttaaacagatgcttgaaggcagcatgctcgttaagagtcatcaccactccctaatctcaagtacccagggacacaaacactgcggaaggccgcagggtcctctgcctaagaaaaccagagacctttgtgcacttgtttatctgctgaccttccctccactattgtcctatgaccctgccaaatccccctctgcgagaaacacccaagaatgatcaattaaaaaaaaaaagaaaaaagaaaacaaacaacccaatttaaaaataggcaacagatctgaacagacacttcaacaaagaagatatgcagatggcaaataagtaaataaaaaggtgtggtggggtggctcctgcctgtaatcccaacactttgggaggctggggcaggaggatcatttgaggccaagagtttcagaccaacctaggcaacacattgagacgccatctctataaaaaataaaaagaaaaaggtcagatgttgtggctcacacctgcaatcccagcactttgggaggccacagctggtaattcccttgagctcaggaggtcaagaccagcccaggcaacgtggtgaaaccccatctctacgaaaaatacaaaaaattagccagatgtggtggtgcacacctgtggtctcagctacttggaagggtgaggtcggaggatcacttgagtctaggaggcagaggttgcagtcagcagagatcgtgccactgcattccagcctggatgacagagcgagaccctgtttctaaataaataaataaataaaataataaaaatagaaataaaaaaatagccaggtgtgacagcacacaactgtagtcccagctactggggaggccgagaaggaggatctaagagttggaggcggcagtgagctatgattgcactgctgtactccagcctgggcaacagagaccctgtttcttaaaataaataaataaacaaacaaacaaataaataaaaggtacttgggccgggcgtggtggctcacacctgtaatcccagcactttgggaggccaaggtgggcagatcacctgaggtcaggcattcgagaccagcctgatcaacatggagaaaccccatgtctactaaaaatacaaaattagccaggcgtggtggtgcatgcctgtaatcccagctacttgggaggctgagacaggagaatcacttgaacctgggaggcagatgttgcagtgagccgagatcatgccattgcacttcagcctcggcgacagagcaagactctgtctccaaaaaaaaagggggctcaacatcaaatgtcattaggaaattgcaaattaaagcaatgatgacatacgacaaccacctattagaatggtgaaaatccaaaacatgaataacaccaagtgctgatgaggatgaggaacgtcaggaactcttattcatctctggcagtaatgcaaaatggtgcagccactttagaagacaatttggcacttccttacaaaactaaacactcttaccatatattgcagcactcatgttccttggtatttactcaaatgagctcaaaacttatatccccacaaaaacctgaagacaaatattcatagcggctctgtacataattgccaaaacttggaagcaaccaagatgtccttcagtagatgaacaaactgcagtacatgcatacaatggaatattactcagttataataagccatgaaaagatatggaggaacctaaaatgcatattgttaagtgaaagaagccaatacgaaatcgctacatatggtatgattccaactataccacattctggaaaaggaaacactatagagacagttaaaaaaaatcattggtttttaggggtttgggaggagggaaggatgaatcagcagagcccagaggagttttaggacagtgaaactactctgcataatactataatggtggacacatgtcattataaatttgttcaaacccatagacaataaaacactaagagagaaactgaatgtaaactatggactttcctctcaattttgctgtgattttaaaactgaaaaaaaaaaaaaaaaaaaaaaaaaaaggcctggcgcggtggctcatgcctgtaattccagcactttgggaggccaaggtgggcagatcatgaggtcaggagatcgagaccatcttggataacacggtgaaaccccgtctctactaaaaatacaaacaattagccgggcgtgattgcgggcacctgtagtcccagctactcaggaggctgaggcaggagaatggtgtgaacccaggaggtggagcttgcggtgagctgagatcacgccactgcactccagcctgggtgacacaggaagactccatctcaaaaaaaaaaaaaaaaaaacaacaccaaaaaaatgctttattaaaaaaaaaaatagaatgtacaaggtatcacacaaggagtggaccttaatgtaaactgcagatttcagctaataataatgtatcaatattggcttattaattgtaacaaacgtagcacagtaacacaagatgttaacagggaagatgaggggcaatgaagggatgaaaggggatgtagaaactctcggtacttttcattcgattttttcctgtaaacctaagactgctccaaaaaaaattattaatgaagaagaaaatcagagataacagatgtcactcaggcaaaaatatcaggtgtccattataaggatccaagttgcccctaggtattcactctaataacagtttgcaacttggggtatgcagtatagaagggataaagaggctggcgcagtggttcacgcctgtaagcccagcagtctggaaagcggaggcgggcggatcacctgaggtcaggagttgaagaccagcctggccaaaatggggaaacctcgtctctattaaaaatacacaaaattgccagacatggtggcacgcgcctgtaatcccagctactgggtcgctgaggcaaaggaattgcttgaacctgggaggcgggggttgcagtgagccaaaattgcgccactgcactccagcctgggcaacagagtaagactccacctcaaaataaaaataaataaataaataaataattaaatttaaaaaaaggccaggtagcggtggctcacacctgtaatcccaccactttgggaggctgaggcgggcagatcacaaggtcaggagatagagaccatcctaacacagtgaaaccctttctctactaaaaatacaaagaattagctaggcgtggtggcacgtgcctgtagtcccagctactcgggaggctgaggcagatgaatcacttgaacccggaaggcagaggttgcagtcagccaagatcgcaccactgcccttgagcctcagcgacggagcaagactccatctcaaaaagaagccaaaaatacaaaaattagccaagtgtggtagtgtgcgcctgtaacctcagggtgagagaggagactctcttcaacccagaaggcagaggtcgagatcataagactgcactccaccctaggcaacagagcaagactccatctcaaaagatatattgcagtaatttaaaaacaattctattggaaacgcaatttcttcctgtcgagacctccctttatgacggaacaatgaaaaaacaatttttttcaattttgtccaggttagcttcaaacacatagcatcgccagcttgtgcgccaggacaacctgacggagccaccgaagctggtggaaaagtgctctcaatttttccatttgaccttctggggagcgatgtagccaatcacgagaggctcacccctgacatcacccagtccccagggacagagagggccctgcgttccatggcgccccctggagggaggaaggggaactgtatctgagagttcagtatctgacaataaggaaaaggcatagtagatcagatggtgcctactgttctggagagaagaaacaacggggttggggaatgcggagttgcagtttataatacaggcctcatgtataaggcagacctcatggggaaggtaacatctgtgcagagaaatggagatgagggctaggagccatgcaaatactggaacatgcttgccagcagaagtcgagaaacatggccggcgcagtggcccacacctgtaatcccaggactttgggaggccgaggcaggtagatcacgaggtcagcagttcgagaccagcctggccaacatggtgaaaccctgtctctactaaatatacaaaaattacccgggcatggggacgggtgcctgtaatcccagctgttcaggaggctgaggcaggggaatcgcttgaacccgggaggcggaggttgcagtgaacagagatcgtgtcactgcactccagcctgggtgatagagtgcgactccgtctgaaaaagaaaaaaaaaaaaaaagaattcaagggcaggccggtggttttagacggcaacctttaccgaagcctcagtgcacagccacagcagagggacacacacctgtatcttttctaagactgggagaattttacaattgcttgactaattgaacagtgcctcgaggatgttacactaggttataaataaattcctgccgtgtttagctgaggcacgaacacaatgcccactgacaattccactttcctcgagggccattctttatgaaaggctgtaggagttccacgacattgttgattcctggattctccaagtctctagaacttgagaactacttttgtgtatttttttaacctttaagttcagagtttctaatgtccgttttatactactataaaatggtactatgtattctttattgatggtactatttacactttattttatacagactctggctccacaaaaaggttaaaaattagccaggtgcagtggtgcacatctgcggccgcagctactcaggaggctgaggcagaaggattgcttgagctcggatggtcagggctgcaatgagctatgatcacacatcacatcaatgcactccagcctgggcaacggagtgagaccctgtctctaaaagaatagaagaggctgggcgcggtggctcacgcctgtcatcctaccactttgggagaccaaggcgagtggatcatttgaggccaggtgttcaagaccagcctggtcaacatggcgaaaccccatctcttggcaggcgactgtaatcccagctactcaggaggctgagataggagactcccttgaaccgacgaggcggaggttgcagtgagcgaagatcacaccactgcactccagcctgggcaacagagcaaggctcggtctcccaaaaaaaaaaaaaaaaaaagacacatggaagtaatttaaaaacacttaggaagatgtcatttcttcctatcaaggcgtcctccctttatgttttgtcgttatattgggaacgataaaaaaaatccttttttccgacccatgtggaccaggctggcctcgaactcgtgccctggaacccccgcctccgtgagggcccgagggcaggcgcaaccggcctgagccacaatggctccgggtgtcggggctgtcctttagtccctttgatcttacgcagggtgagggagccaatcaccagaggctcccccctgtcgtcacccagtccccagggccagtgagggccctgcgttccatggcgccccctggagggaggaaggggaactgtatctgagagttcagtatctgacaataaggaaaaggcatagtagatcagatggtgcctagtgttctggggagaagaaacaacggggttggggaatgcggagttgcagtttataatacaggcctcatgtataaggcagacctcatggggaaggtaacatctgtgcagagaaatggagatgagggctaggagccatgcaaatactggaacatgcttgccagcagaagtcgagaaacatggccggcgcagtggcccacacctgtaatcccaggactttgggaggccgaggcaggtagatcacgaggtcagcagttcgagaccagcccggccaacatggtgaaaccctgtctctactaaaaatacaaaaattagctgggtgtggtggcacacgcctgtaatcccagccacttgggagggtgaggtaggagaatcgcttgaacctgggaggtagaggttgcagtgatgcagtgagccgagaccacgccattgtactctcgcctgggcgacagagcgagactccatctcaaaaaaaaaaaaaaaaaaagcaaaaacaaacaggtgagattcattttgataaaatagctgatttaacctaatatacctaaaacatcataattttaacataatcaatagaaacatttttgcaagattttatgttattttttaccatacgacgtcttggaaatcttggtttggaccagccatgttcaactgctcagtagccatgtgtggccagaggcggccgtattggacagtgcagatggtgcatgagggtgttcgggcagtgggaacagccagtacagaggccctgtgggggcacatgcctgctgctacgggaacagtgaggagccccgtgtggctgcagtggagtgagagggagaaggtgggagatgtaaccaacagtctcatcattcattcattaaatccttttttttctttttttgagactgagtttcgctcttgttgcccaggctggagtgcaatggtgccatctcggctcaccacaacctccacctcttgagttcaagcgattctcctgcctcagccttccgagtagctgggattacaggcatgcgccaccatgcccggctaattttgtatttttagtagagctggggtttctccctgttggtcaggctggtctcgaactcccgacctcaggtgatctgcccgccttgacctcccaaagtgctgtgattacaggcttgagccactgctcccagtccattgaatgtgtgtatatatagttgaataaagaagacaccggagtttgttctgtatcttctcctttcaaattctgtgccatttgaattttttcctattccttttatatatttttaattgacaaattgtacatatttatcatgtacatattgttttgaaatatgtatataccgtagaatggctaaatcaagatcattaacatatgtattactttacctattttccttttttcgttgtgtctctgccaggtttcggtatcagaatgactctgacctcatagaatgagttagagagcagttgctcctcctcaattgtgtggaataatttcagtaggattggtgccggcttttctttacacatctggtaggattcgactgtgaatccgtctagtctaaggttttttgtgctggttggtaggttttgtatgactaactcaattttggaactcatcgttggtttgttcagggtttccatttcttcctggttcaatcttgagaggttttatgtttccaggaatttctctatttcttctagttttctagtttgtgtgcatagacgcatgtggaatagtctcagggtttcttgtatatctctgggtcagtggaaatgtcacctttgtcatttctgattgtgtttatttggatcttgtctttttttctttattaatctagctagtggtcttcccatgttatttatgctttcaaaaatatcaactttgtatgaattaacagcatttgccgtgacctggatgagaccggagactgttattctaagtgaagtaagtcaggaatggaaaaccaaacatcgtatgttctcactgatatgtgggagctaagctatgaggacgcaaaggcgtaagaatgatacaatggactttggggacttagggggacgagttggcgggggcgagggataaaatacaacaagtagggtgtagtgtatactgctcaggtgatgggtgcaccaaaatcacaaatcaccactaaagagcttatgtaaccacacaccacctgtaccccaataatttatggaataaataataaataaataatttttttaaaaaatcaactttgggtttcattgatcttttgtatggttttttacgtctccatttcattcaggtcagctccgatgttggtttttttttttcttctgctagctttggggttgatttgctcttgtttttctaattcctctaggtgtgatgttaggcggttcatttgagatctttctagcttcttagtgtagccctttagcactagaaacttcctttgagcactgttctagctgtgtcccagagattctgggatgttgtatgtttgttttcattagtttcagataatttttttatttctgccttaatttcagtctttacccaaaagtcatttggaagcaggttgtttaatttccatgccgactctaggccaggcatggtggctcatgcctgtaatcccagccacttgggaggctgaggcaggagaatcgcttgaatccaggaggcagaggtttcagtgagccaagatcacgccactgcactccagcccgggcgacagagtgaggctgcgtctcaaaaaaaaaaaaaaaaaaaaaattgccccttcttaagtttgcatttagatctcttctcctttgaccacttttaatttatcttcacttctgatatgacatttaatttttcattcattttctgtctattattgttccttttttaacttaaaaaaaattctgtactttatgaatttctgtttcaaggtgtttttcccatctccaaatgcttatttgaaaatgtttcctttcctcttggttcatttcttctggtgtgtgtgtgcgcgcgcccgcgtgcatgtgtgtactcgggtctcattttctgctttcttcctgcagtacttcgtttatgggagatgcacttcgcttttcttatttttttagtagagagggggtttcactggtttagccagaacagtctcgatctcctgacctcgtgatccgcccacctcgggctcccaaagtgctgggattccaggagtgagccaccgcgcccggccgtccactttgcttcttgcagaggctgatggtttgagtaatttccgagattcatagctcgagcgcgccctgttctgtctatgcagtgaagggcagctttttgcatccacggctttttgttggcaaggaggaatgtgcagtggccagatttgtttcttccccttttgttgctgttgttgttgttgctgctgctgttattgttgttgttgttgtattttattttgtagcatcctaaagtgtcccctccttctatttcttatccttatccaggtagggtttagaaaagctaacttcaggggcaggggagagagagaaagagaggaagagaaaatgagaatgaatgacaatacatgaacccatgggtcaacctttatttcaaggcagcccaaaaggacggctctcccttctctttcactctcttctctaggtgtgaagctgatgcagcacaggcgagccccaaaattgaggcttagcccgggggggttcttggcttctcctagaaactaattcaagaagccgggcgcagtggctcacgcctgtaatcccagcactttgggaggctgaggcggatggatcacttgaggtaaggagttcgagaccagcctggccaacatggtgaaaccccatctctactaaatatacaaaaattacccgggcatggggacgggtgcctgtaatcccagctgttcaggaggctgaggcaggggaatcgcttgaacccgggaggcggaggttgcagtgaacagagatcgtgtcactgcactccagcctgggtgatagagtgcgactccgtctgaaaaagaaaaaaataattcaagggcaggccggtggttttagacggcaacctttaccgaagcctcagtgcacagccacagcagagggacacacacctgtatcttttctaagactgggagaattttacaattgcttgactaattgaacagtgcctcgaggatgttacactaggttataaataaattcctgccgtgtttagctgaggcacgaacacaatgcccactgacaattccactttcctcgagggccattctttatgaaaggctgtaggagttccacgacattgttgattcctggattctccaagtctctagaacttgagaactacttttgtgtatttttttaacctttaagttcagagtttctaatgtccgttttatactactataaaatggtactatgtattctttattgatggtactatttacactttattttatacagactctggctccacaaaaaggttaaaaattagccaggtgcagtggtgcacatctgcggccccagctactcaggaggctgaggcagaaggattgcttgagctcggatggtcagggctgcaatgagctatgatcacacatcacatcaatgcactccagcctgggcaacagagtgagaccctgtctctaaaagaatagaagaggctgggcgcggtggctcacgcctgtcatcctaccactttgggagaccaaggcgagtggatcatttgaggccaggtgttcaagaccagcctggtcaacatggcgaaaccccatctcttggcaggcgactgtaatcccagctactcaggaggctgagataggagactcccttgaaccgacgaggcggaggttgcagtgagcgaagatcacaccactgcactccagcctgggcaacagagcaaggctcggtctcccaaaaaaaaaaaaaaaaaaagacacatggaagtaatttaaaaacacttaggaagatgtcatttcttcctatcaaggcgtcctccctttatgttttgtcgttatattgggaacgataaaaaaaatccttttttccgacccatgtggaccaggctggcctcgaactcgtgccctggaacccccgcctccgtgagggcccgagggcaggcgcaaccggcctgagccacaatggctccgggtgtcggggctgtcctttagtccctttgatcttacgcagggtgagggagccaatcaccagaggctcccccctgtcgtcacccagtccccagggccagtgagggccctgcgttccatggcgccccctggagggaggaaggggaactgtatctgagagttcagtatctgacaataaggaaaaggcatggtagatcagatggtgcctagtgttctggggagaagaaacaacggggttggggaatgcggagttgcagtttataatacaggcctcatgtataaggcagacctcatggggaaggtaacatctgtgcagagaaatggagatgagggctaggagccatgcaaatactggaacatgcttgccagcagaagtcgagaaacaaggctggcgcagtggcccacacctgtaatcccaggactttgggaggccgaggcaggtagatcacgaggtcagcagttcgagaccagcctggccaacatggtgaaaccctgtctctactaaaaatacaaaaattagctgggtgtggtggcacacgcctgtaatcccagccacttgggaggctgaggcaggagaatcgcttgaatccaggaggcagaggtttcagtgagccaagatcacgccactgcactccagcccgggcgacacagtgaggctgcgtctcaaaaaaaaaaaaaaaaaaaaaaaaattgccccttcttaagtttgcatttagatctcttctcctttgaccacttttaatttatcttcacttctgatatgacatttaatttttcattcattttctgtctattattgttcgttttttaacttaaaaaaaaattctgtactttatgaatttctgtttcaaggtgtttttcccatctccaaatgcttatttggaaatgtttcctttcctcttggttcatttcttctggtgtgtgtgtgcgcgcgcccgcgtgcatgtgtgtactcgggtctcattttctgctttcttcctgcagtacctcgtttatgggagatgcacttcgcttttcttatttttttagtagagagggggtttcactggtttagccagaacagtctcgatctcctgaccttgtgatccgcccacctcgggctcccaaagtgctgggattccaggagtgagccaccgtgcccggccgtccactttgcttcttgcagaggctgatggtttgagtaatttccgagattcatagctcgagcgcgccctgttctgtctatgcagtgaagggcagctttttgcatccacggctttttgttggcaaggaggaatgtgcagtggccagatttgtttcttccccttttgttgctgttgttgttgttgctgctgctgttattgttgttgttgttgtattttattttgtagcatcctaaagtgtcccctccttctatttcttatccttatccaggtagggtttagaaaagctaacttcaggggcaggggagagagagaaagagaggaggagaaaatgagaatgaatgacaatacatgaacccatgggtcaacctttatttcaaggcagcccaaaaggacggctctcccttctctttcactctcttctctaggtgtgaagctgatgcagcacaggcgagccccaaaattgaggcttagcccgggggggttcttggcttctcctagaaactaattcaagaagccgggcgcagtggctcacgcctgtaatcccagcactttgggaggctgaggcggatggatcacttgaggtaaggagttcgagaccagcctggccaacatggtgaaaccccatctctactaaatatacaaaaattacccgggcatggggacgggtgcctgtaatcccagctgttcaggaggctgaggcaggggaatcgcttgaacccgggaggcggaggttgcagtgaacagagatcgtgtcactgcactccagcctgggtgatagagtgcgactccgtctgaaaaagaaaaaaagaattcaagggcaggccggtggttttagacggcaacctttaccgaagcctcagtgcacagccacagcagagggacacacacctgtatcttttctaagactgggagaattttacaattgcttgactaattgaacagtgcctcgaggatgttacactaggttataaataaattcctgccgtgtttagctgaggcacgaacacaatgcccactgacaattccactttcctcgagggccattctttatgaaaggctgtaggagttccacgacattgttgattcctggattctccaagtctctagaacttgagaactacttttgtgtatttttttaacctttaagttcagagtttctaatgtccgttttatactactataaaatggtactatgtattctttattgatggtactatttacactttattttatacagactctggctccacaaaaaggttaaaaattagccaggtgcagtggtgcacatctgcggccccagctactcaggaggctgaggcagaaggattgcttgagctcggatggtcagggctgcaatgagctatgatcacacatcacatcaatgcactccagcctgggcaacggagtgagaccctgtctctaaaagaatagaagaggctgggcgcggtggctcacgcctgtcatcctaccactttgggagaccaaggcgagtggatcatttgaggccaggtgttcaagaccagcctggtcaacatggcgaaaccccatctcttggcaggcgactgtaatcccagctactcaggaggctgagataggagactcccttgaaccgacgaggcggaggttgcagtgagcgaagatcacaccactgcactccagcctgggcaacagagcaaggctcggtctcccaaaaaaaaaaaaaaaaaaagacacatggaagtaatttaaaaacacttaggaagatgtcatttcttcctatcaaggcgtcctccctttatgttttgtcgttatattgggaacgataaaaaaaatccttttttccgacccatgtggaccaggctggcctcgaactcgtgccctggaacccccgcctccgtgagggcccgagggcaggcgcaaccggcctgagccacaatggctccgggtgtcggggctgtcctttagtccctttgatcttacgcagggtgagggagccaatcaccagaggctcccccctgtcgtcacccagtccccagggccagtgagggccctgcgttccatggcgccccctggagggaggaaggggaactgtatctgagagttcagtatctgacaataaggaaaaggcatggtagatcagatggtgcctagtgttctggggagaagaaacaacggggttggggaatgcggagttgcagtttataatacaggcctcatgtataaggcagacctcatggggaaggtaacatctgtgcagagaaatggagatgagggctaggagccatgcaaatactggaacatgcttgccagcagaagtcgagaaacaaggctggcgcagtggcccacacctgtaatcccaggactttgggaggccgaggcaggtagatcacgaggtcagcagttcgagaccagcctggccaacatggtgaaaccctgtctctactaaaaatacaaaaattagctgggtgtggtggcacacgcctgtaatcccagccacttgggaggctgaggcaggagaatcgcttgaatccaggaggcagaggtttcagtgagccaagatcacgccactgcactccagcccgggcgacacagtgaggctgcgtctcaaaaaaaaaaaaaaaaaaaaaaaaattgccccttcttaagtttgcatttagatctcttctcctttgaccacttttaatttatcttcacttctgatatgacatttaatttttcattcattttctgtctattattgttcgttttttaacttaaaaaaaaattctgtactttatgaatttctgtttcaaggtgtttttcccatctccaaatgcttatttggaaatgtttcctttcctcttggttcatttcttctggtgtgtgtgtgcgcgcgcccgcgtgcatgtgtgtactcgggtctcattttctgctttcttcctgcagtacctcgtttatgggagatgcacttcgcttttcttatttttttagtagagagggggtttcactggtttagccagaacagtctcgatctcctgacctcgtgatccgcccacctcgggctcccaaagtgctgggattccaggagtgagccaccgcgcccggccgtccactttgcttcttgcagaggctgatggtttgagtaatttccgagattcatagctcgagcgcgccctgttctgtctatgcagtgaagggcagctttttgcatccacggctttttgttggcaaggaggaatgtgcagtggccagatttgtttcttccccttttgttgctgttgttgttgttgctgctgctgttattgttgttgttgttgtattttattttgtagcatcctaaagtgtcccctccttctatttcttatccttatccaggtagggtttagaaaagctaacttcaggggcaggggagagagagaaagagaggaagagaaaatgagaatgaatgacaatacatgaacccatgggtcaacctttatttcaaggcagcccaaaaggacggctctcccttctctttcactctcttctctaggtgtgaagctgatgcagcacaggcgagccccaaaattgaggcttagcccgggggggttcttggcttctcctagaaactaattcaagaagccgggcgcagtggctcacgcctgtaatcccagcactttgggaggctgaggcggatggatcacttgaggtaaggagttcgagaccagcctggccaacatggtgaaaccccatctctactaaatatacaaaaattacccgggcatggggacgggtgcctgtaatcccagctgttcaggaggctgaggcaggggaatcgcttgaacccgggaggcggaggttgcagtgaacagagatcgtgtcactgcactccagcctgggtgatagagtgcgactccgtctgaaaaaaaaaaaaagaattcaagggcaggccggtggttttagacggcaacctttaccgaagcctcagtgcacagccacagcagagggacacacacctgtatcttttctaagactgggagaattttacaattgcttgactaattgaacagtgcctcgaggatgttacactaggttataaataaattcctgccgtgtttagctgaggcacgaacacaatgcccactgacaattccactttcctcgagggccattctttatgaaaggctgtaggagttccacgacattgttgattcctggattctccaagtctctagaacttgagaactacttttgtgtatttttttaacctttaagttcagagtttctaatgtccgttttatactactataaaatggtactatgtattctttattgatggtactatttacactttattttatacagactctggctccacaaaaaggttaaaaattagccaggtgcagtggtgcacatctgcggccccagctactcaggaggctgaggcagaaggattgcttgagctcggatggtcagggctgcaatgagctatgatcacacatcacatcaatgcactccagcctgggcaacggagtgagaccctgtctctaaaagaatagaagaggctggccgcggtggctcacgcctgtcatcctaccactttgggagaccaaggcgagtggatcatttgaggccaggtgttcaagaccagcctggtcaacatggcgaaaccccatctcttggcaggcgactgtaatcccagctactcaggaggctgagataggagactcccttgaaccgacgaggcggaggttgcagtgagcgaagatcacaccactgcactccagcctgggcaacagagcaaggctcggtctcccaaaaaaaaaaaaaaaaaagacacatggaagtaatttaaaaacacttaggaagatgtcatttcttcctatcaaggcgtcctccctttatgttttgtcgttatattgggaacgataaaaaaaatccttttttccgacccatgtggaccaggctggcctcgaactcgtgccctggaacccccgcctccgtgagggcccgagggcaggcgcaaccggcctgagccacaatggctccgggtgtcggggctgtcctttagtccctttgatcttacgcagggtgagggagccaatcaccagaggctcccccctgtcgtcacccagtccccagggccagtgagggccctgcgttccatggcgccccctggagggaggaaggggaactgtatctgagagttcagtatctgacaataaggaaaaggcatggtagatcagatggtgcctagtgttctggggagaagaaacaacggggttggggaatgcggagttgcagtttataatacaggcctcatgtataaggcagacctcatggggaaggtaacatctgtgcagagaaatggagatgagggctaggagccatgcaaatactggaacatgcttgccagcagaagtcgagaaacaaggctggcgcagtggcccacacctgtaatcccaggactttgggaggccgaggcaggtagatcacgaggtcagcagttcgagaccagcctggccaacatggtgaaaccctgtctctactaaaaatacaaaaattagctgggtgtggtggcacacgcctgtaatcccagccacttgggaggctgaggcaggagaatcgcttgaatccaggaggcagaggtttcagtgagccaagatcacgccactgcactccagcccgggcgacacagtgaggctgcgtctcaaaaaaaaaaaaaaaaaaaaaaaattgccccttcttaagtttgcatttagatctcttctcctttgaccacttttaatttatcttcacttctgatatgacatttaatttttcattcattttctgtctattattgttcgttttttaacttaaaaaaaaattctgtactttatgaatttctgtttcaaggtgtttttcccatctccaaatgcttatttggaaatgtttcctttcctcttggttcatttcttctggtgtgtgtgtgcgcgcgcccgcgtgcatgtgtgtactcgggtctcattttctgctttcttcctgcagtacctcgtttatgggagatgcacttcgcttttcttatttttttagtagagagggggtttcactggtttagccagaacagtctcgatctcctgacctcgtgatccgcccacctcgggctcccaaagtgctgggattccaggagtgagccaccgcgcccggccgtccactttgcttcttgcagaggctgatggtttgagtaatttccgagattcatagctcgagcgcgccctgttctgtctatgcagtgaagggcagctttttgcatccacggctttttgttggcaaggaggaatgtgcagtggccagatttgtttcttccccttttgttgctgttgttgttgttgctgctgctgttattgttgttgttgttgtattttattttgtagcatcctaaagtgtcccctccttctatttcttatccttatccaggtagggtttagaaaagctaacttcaggggcaggggagagagagaaagagaggaagagaaaatgagaatgaatgacaatacatgaacccatgggtcaacctttatttcaaggcagcccaaaaggacggctctcccttctctttcactctcttctctaggtgtgaagctgatgcagcacaggcgagccccaaaattgaggcttagcccgggggggttcttggcttctcctagaaactaattcaagaagccgggcgcagtggctcacgcctgtaatcccagcactttgggaggctgaggcggatggatcacttgaggtaaggagttcgagaccagcctggccaacatggtgaaaccccatctctactaaatatacaaaaattacccgggcatggggacgggtgcctgtaatcccagctgttcaggaggctgaggcaggggaatcgcttgaacccgggaggcggaggttgcagtgaacagagatcgtgtcactgcactccagcctgggtgatagagtgcgactccgtctgaaaaaaaaaaaaagaattcaagggcaggccggtggttttagacggcaacctttaccgaagcctcagtgcacagccacagcagagggacacacacctgtatcttttctaagactgggagaattttacaattgcttgactaattgaacagtgcctcgaggatgttacactaggttataaataaattcctgccgtgtttagctgaggcacgaacacaatgcccactgacaattccactttcctcgagggccattctttatgaaaggctgtaggagttccacgacattgttgattcctggattctccaagtctctagaacttgagaactacttttgtgtatttttttaagttcagagtttctaatgtccgttttatactactataaaatggtactatgtattctttattgatggtactatttacactttattttatacagactctggctccacaaaaaggttaaaaattagccaggtgcagtggtgcacatctgcggccccagctactcaggaggctgaggcagaaggattgcttgagctcggatggtcagggctgcaatgagctatgatcacacatcacatcaatgcactccagcctgggcaacagagtgagaccctgtctctaaaagaatagaagaggctgggcgcggtggctcacgcctgtcatcctaccactttgggagaccaaggcgagtggatcatttgaggccaggtgttcaagaccagcctggtcaacatggcgaaaccccatctcttggcaggcgactgtaatcccagctactcaggaggctgagataggagactcccttgaaccgacgaggcggaggttgcagtgagcgaagatcacaccactgcactccagcctgggcaacagagcaaggctcggtctcccaaaaaaaaaaaaaaaaaaaaagacacatggaagtaatttaaaaacacttaggaagatgtcatttcttcctatcaaggcgtcctccctttatgttttgtcgttatattgggaacgataaaaaaaatccttttttccgacccatgtggaccaggctggcctcgaactcgtgccctggaacccccgcctccgtgagggcccgagggcaggcgcaaccggcctgagccacaatggctccgggtgtcggggctgtcctttagtccctttgatcttacgcagggtgagggagccaatcaccagaggctcccccctgtcgtcacccagtccccagggccagtgagggccctgcgttccatggcgccccctggagggaggaaggggaactgtatctgagagttcagtatctgacaataaggaaaaggcatagtagatcagatggtgcctagtgttctggggagaagaaacaacggggttggggaatgcggagttgcagtttataatacaggcctcatgtataaggcagacctcatggggaaggtaacatctgtgcagagaaatggagatgagggctaggagccatgcaaatactggaacatgcttgccagcagaagtcgagaaacatggccggcgcagtggcccacacctgtaatcccaggactttgggaggccgaggcaggtagatcacgaggtcagcagttcgagaccagcccggccaacatggtgaaaccctgtctctactaaaaatacaaaaattagctgggtgtggtggcacacgcctgtaatcccagccacttgggagggtgaggtaggagaatcgcttgaacctgggaggtagaggttgcagtgatgcagtgagccgagaccacgccattgtactctcgcctgggcgacagagcgagactccatctcaaaaaaaaaaaaaaaaaaaaaaaaaaaaagcaaaaacaaacaggtgagattcattttgataaaatagctgatttaacctaatatacctaaaacatcataattttaacataatcaatagaaacatttttgcaagattttatgttattttttaccatacgacgtcttggaaatcttggtttggaccagccatgttcaactgctcagtagccatgtgtggccagaggcggccgtattggacagtgcagatggtgcatgagggtgttcgggcagtgggaacagccagtacagaggccctgtgggggcacatgcctgctgctacgggaacagtgaggagccccgtgtggctgcagtggagtgagagggagaaggtgggagatgtaaccaacagtctcatcattcattcattaaatccttttttttctttttttgagactgagtttcgctcttgttgcccaggctggagtgcaatggtgccatctcggctcaccacaacctccacctcttgagttcaagcgattctcctgcctcagccttccgagtagctgggattacaggcatgcgccaccatgcccggctaattttgtatttttagtagagctggggtttctccctgttggtcaggctggtctcgaactcccgacctcaggtgatctgcccgccttgacctcccaaagtgctgtgattacaggcttgagccactgctcccagtccattgaatgtgtgtatatatagttgaataaagaagacaccggagtttgttctgtatcttctcctttcaaattctgtgccatttgaattttttcctattccttttatatatttttaattgacaaattgtacatatttatcatgtacatattgttttgaaatatgtatataccgtagaatggctaaatcaagatcattaacatatgtattactttacctattttccttttttcgttgtgtctctgccaggtttcggtatcagaatgactctgacctcatagaatgagttagagagcagttgctcctcctcaattgtgtggaataatttcagtaggattagtgccgccttttctttacacgtctggtaggattcgactgtgaatccgtctagtctaaggttttttgtgctggttggtaggttttgtatgactaactcaattttggaactcatcgttggtttgttcagggtttccatttcttcctggttcaatcttgagaggttttatgtttccaggaatttctctatttcttctagttttctagtttgtgtgcatagaggcatgtggaatagtctcagggtttcttgtatatctgtgggtcagtggtaatgtcacctttgtcatttctgattgtgtttatttggatcttgtctttttttctttattaatctagctagtggtcttcccatgttatttatgctttcaaaaatatcaactttgtatgaattaacagcatttgccgtgacctggatgagaccggagactgttattctaagtgaagtaagtcaggaatggaaaaccaaacatcgtatgttctcactgatatgtgggagctaagctatgaggacgcaaaggcgtaagaatgatacaatggactttggggacttagggggacgagttggcgggggcgagggataaaatacaacaagtagggtgtagtgtatactgctcaggtgatgggtgcaccaaaatcacaaatcaccactaaagagcttatgtaaccacacaccacctgtaccccaataatttatggaataaataataaataaataatttttttaaaaaatcaactttgggtttcattgatcttttgtatggttttttacgtctccatttcattcaggtcagctccgatgttggtttttttttttcttctgctagctttggggttgatttgctcttgtttttctaattcctctaggtgtgatgttaggcggttcatttgagatctttctagcttcttagtgtagccctttagcactagaaacttcctttgagcactgttctagctgtgtcccagagattctgggatgttgtatgtttgttttcattagtttcagataatttttttatttctgccttaatttcagtctttacccaaaagtcatttggaagcaggttgtttaatttccatgatgactctaggccgggcatggtggctcatgcctgtaatcccagccacttgggaggctgaggcaggagaatcgcttgaatccaggaggcagaggtttcagtgagccaagatcacgccactgcactccagcccgggcgacagagtgaggctgcgtctcaaaaaaaaaaaaaaaaaaaaaaaattgccccttcttaagtttgcatttagatctcttctcctttgaccacttttaatttatcttcacttctgatatgacatttaatttttcattcattttctgtctattattgttccttttttaacttaaaaaaaattctgtactttatgaatttctgtttcaaggtgtttttcccatctccaaatgcttatttgaaaatgtttcctttcctcttggttcatttcttctggtgtgtgtgtgcgcgcgcccgcgtgcatgtgtgtactcgggtctcattttctgctttcttcctgcagtacctcgtttatgggagatgcacttcgcttttgttatttttttagtagagagggggtttcactggtttagccagaacagtctcgatctcctgacctcgtgatccgcccacctcgggctcccaaagtgctgggattccaggagtgagccaccgcgcccggccgtccactttgcttcttgcagaggctgatggtttgagtaatttccgagattcatagctcgagcgcgccctgttctgtctatgcagtgaagggcagctttttgcatccacggctttttgttggcaaggaggaatgtgcagtggccagatttgtttcttccccttttgttgctgttgttgttgttgctgctgctgttattgttgttgttgttgtattttattttgtagcatcctaaagtgtcccctccttctatttcttatccttatccaggtagggtttagaaaagctaacttcaggggcaggggagagagagaaagagaggaagagaaaatgagaatgaatgacaatacatgaacccatgggtcaacctttatttcaaggcagcccaaaaggacggctctcccttctctttcactctcttctctaggtgtgaagctgatgcagcacaggcgagccccaaaattgaggcttagcccgggggggttcttggcttctcctagaaactaattcaagaagccgggcgcagtggctcacgcctgtaatcccagcactttgggaggctgaggcggatggatcacttgaggtaaggagttcgagaccagcctggccaacatgctgaaaaccccatctctactaaatatacaaaaattacccgggcatggggacgggtgcctgtaatcccagctgttcaggaggctgaggcaggggaatcgcttgaacccgggaggcggaggttgcagtgaacagagatcgtgtcactgcactccagcctgggtgatagagtgcgactccgtctgaaaaaaaaaaaaaaagaattcaagggccggccggtggttttagacggcaacctttaccgaagcctcagtgcacagccacagcagagggacacacacctgtatcttttctaagactgggagaattttacaattgcttgactaattgaacagtgcctcgaggatgttacactaggttataaataaattcctgccgtgtttagctgaggcacgaacacaatgcccactgacaattccactttcctcgagggccattctttatgaaaggctgtaggagttccacgacattgttgattcctggattctccaagtctctagaacttgagaactacttttgtgtatttttttaacctttaagttcagagtttctaatgtccgttttatactactataaaatggtactatgtattctttattgatggtactatttacactttattttatacagactctggctccacaaaaaggttaaaaattagccaggtgcagtggtgcacatctgcggccccagctactcaggaggctgaggcagaaggattgcttgagctcggatggtcagggctgcaatgagctatgatcacacatcacatcaatgcactccagcctgggcaacagagtgagaccctgtctctaaaagaatagaagaggctgggcgcggtggctcacgcctgtcatcctaccactttgggagaccaaggcgagtggatcatttgaggccaggtgttcaagaccagcctggtcaacatggcgaaaccccatctcttggcaggcgactgtaatcccagctactcaggaggctgagataggagactcccttgaaccgacgaggcggaggttgcagtgagcgaagatcacaccactgcactccagcctgggcaacagagcaaggctcggtctcccaaaaaaaaaaaaaaaaaaaaagacacatggaagtaatttaaaaacacttaggaagatgtcatttcttcctatcaaggcgtcctccctttatgttttgtcgttatattgggaacgataaaaaaaatccttttttccgacccatgtggaccaggctggcctcgaactcgtgccctggaacccccgcctccgtgagggcccgagggcaggcgcaaccggcctgagccacaatggctccgggtgtcggggctgtcctttagtccctttgatcttacgcagggtgagggagccaatcaccagaggctcccccctgtcgtcacccagtccccagggccagtgagggccctgcgttccatggcgccccctggagggaggaaggggaactgtatctgagagttcagtatctgacaataaggaaaaggcatagtagatcagatggtgcctagtgttctggggagaagaaacaacggggttggggaatgcggagttgcagtttataatacaggcctcatgtataaggcagacctcatggggaaggtaacatctgtgcagagaaatggagatgagggctaggagccatgcaaatactggaacatgcttgccagcagaagtcgagaaacatggccggcgcagtggcccacacctgtaatcccaggactttgggaggccgaggcaggtagatcacgaggtcagcagttcgagaccagcccggccaacatggtgaaaccctgtctctactaaaaatacaaaaattagctgggtgtggtggcacacgcctgtaatcccagccacttgggagggtgaggtaggagaatcgcttgaacctgggaggtagaggttgcagtgatgcagtgagccgagaccacgccattgtactctcgcctgggcgacagagcgagactccatctcaaaaaaaaaaaaaaaaaaaaaaaaaaaaagcaaaaacaaacaggtgagattcattttgataaaatagctgatttaacctaatatacctaaaacatcataattttaacataatcaatagaaacatttttgcaagattttatgttattttttaccatacgacgtcttggaaatcttggtttggaccagccatgttcaactgctcagtagccatgtgtggccagaggcggccgtattggacagtgcagatggtgcatgagggtgttcgggcagtgggaacagccagtacagaggccctgtgggggcacatgcctgctgctacgggaacagtgaggagccccgtgtggctgcagtggagtgagagggagaaggtgggagatgtaaccaacagtctcatcattcattcattaaatccttttttttctttttttgagactgagtttcgctcttgttgcccaggctggagtgcaatggtgccatctcggctcaccacaacctccacctcttgagttcaagcgattctcctgcctcagccttccgagtagctgggattacaggcatgcgccaccatgcccggctaattttgtatttttagtagagctggggtttctccctgttggtcaggctggtctcgaactcccgacctcaggtgatctgcccgccttgacctcccaaagtgctgtgattacaggcttgagccactgctcccagtccattgaatgtgtgtatatatagttgaataaagaagacaccggagtttgttctgtatcttctcctttcaaattctgtgccatttgaattttttcctattccttttatatatttttaattgacaaattgtacatatttatcatgtacatattgttttgaaatatgtatataccgtagaatggctaaatcaagatcattaacatatgtattactttacctattttccttttttcgttgtgtctctgccaggtttcggtatcagaatgactctgacctcatagaatgagttagagagcagttgctcctcctcaattgtgtggaataatttcagtaggattggtgccgccttttctttacacgtctggtaggattcgactgtgaatccgtctagtctaaggttttttgtgctggttggtaggttttgtatgactaactcaattttggaactcatcgttggtttgttcagggtttccatttcttcctggttcaatcttgagaggttttatgtttccaggaatttctctatttcttctagttttctagtttgtgtgcatagaggcatgtggaatagtctcagggtttcttgtatatctgtgggtcagtggtaatgtcacctttgtcatttctgattgtgtttatttggatcttgtctttttttctttattaatctagctagtggtcttcccatgttatttatgctttcaaaaatatcaactttgtatgaattaacagcatttgccgtgacctggatgagaccggagactgttattctaagtgaagtaagtcaggaatggaaaaccaaacatcgtatgttctcactgatatgtgggagctaagctatgaggacgcaaaggcgtaagaatgatacaatggactttggggacttagggggacgagttggcgggggcgagggataaaatacaacaagtagggtgtagtgtatactgctcaggtgatgggtgcaccaaaatcacaaatcaccactaaagagcttatgtaaccacacaccacctgtaccccaataatttatggaataaataataaataaataatttttttaaaaaatcaactttgggtttcattgatcttttgtatggttttttacgtctccatttcattcaggtcagctccgatgttggtttttttttttcttctgctagctttggggttgatttgctcttgtttttctaattcctctaggtgtgatgttaggcggttcatttgagatctttctagcttcttagtgtagccctttagcactagaaacttcctttgagcactgttctagctgtgtcccagagattctgggatgttgtatgtttgttttcattagtttcagataatttttttatttctgccttaatttcagtctttacccaaaagtcatttggaagcaggttgtttaatttccatgatgactctaggccgggcatggtggctcatgcctgtaatcccagccacttgggaggctgaggcaggagaatcgcttgaatccaggaggcagaggtttcagtgagccaagatcacgccactgcactccagcccgggcgacagagtgaggctgcgtctcaaaaaaaaaaaaaaaaaaaaaaattgccccttcttaagtttgcatttagatctcttctcctttgaccacttttaatttatcttcacttctgatatgacatttaatttttcattcattttctgtctattattgttccttttttaacttaaaaaaaattctgtactttatgaatttctgtttcaaggtgtttttcccatctccaaatgcttatttgaaaatgtttcctttcctcttggttcatttcttctggtgtgtgtgtgcacgcgcccgcgtgcatgtgtgtactcgggtctcattttctgctttcttcctgcagtacctcgtttatgggagatgcacttcgcttttgttatttttttagtagagagggggtttcactggtttagccagaacagtctcgatctcctgacctcgtgatccgcccacctcgggctcccaaagtgctgggattccaggagtgagccaccgcgcccggccgtccactttgcttcttgcagaggctgatggtttgagtaatttccgagattcatagctcgagcgcgccctgttctgtctatgcagtgaagggcagctttttgcatccacggctttttgttggcaaggaggaatgtgcagtggccagatttgtttcttccccttttgttgctgttgttgttgttgctgctgctgttattgttgttgttgttgtattttattttgtagcatcctaaagtgtcccctccttctatttcttatccttatccaggtagggtttagaaaagctaacttcaggggcaggggagagagagaaagagaggaagagaaaatgagaatgaatgacaatacatgaacccatgggtcaacctttatttcaaggcagcccaaaaggacggctctcccttctctttcactctcttctctaggtgtgaagctgatgcagcacaggcgagccccaaaattgaggcttagcccgggggggttcttggcttctcctagaaactaattcaagaagccgggcgcagtggctcacgcctgtaatcccagcactttgggaggctgaggcggatggatcacttgaggtaaggagttcgagaccagcctggccaacatgctgaaaaccccatctctactaaatatacaaaaattacccgggcatggggacgggtgcctgtaatcccagctgttcaggaggctgaggcaggggaatcgcttgaacccgggaggcggaggttgcagtgaacagagatcgtgtcactgcactccagcctgggtgatagagtgcgactccgtctgaaaaaaaaaaaaaaagaattcaagggccggccggtggttttagacggcaacctttaccgaagcctcagtgcacagccacagcagagggacacacacctgtatcttttctaagactgggagaattttacaattgcttgactaattgaacagtgcctcgaggatgttacactaggttataaataaattcctgccgtgtttagctgaggcacgaacacaatgcccactgacaattccactttcctcgagggccattctttatgaaaggctgtaggagttccacgacattgttgattcctggattctccaagtctctagaacttgagaactacttttgtgtatttttttaacctttaagttcagagtttctaatgtccgttttatactactataaaatggtactatgtattctttattgatggtactatttacactttattttatacagactctggctccacaaaaaggttaaaaattagccaggtgcagtggtgcacatctgcggccccagctactcaggaggctgaggcagaaggattgcttgagctcggatggtcagggctgcaatgagctatgatcacacatcacatcaatgcactccagcctgggcaacagagtgagaccctgtctctaaaagaatagaagaggctgggcgcggtggctcacgcctgtcatcctaccactttgggagaccaaggcgagtggatcatttgaggccaggtgttcaagaccagcctggtcaacatggcgaaaccccatctcttggcaggcgactgtaatcccagctactcaggaggctgagataggagactcccttgaaccgacgaggcggaggttgcagtgagcgaagatcacaccactgcactccagcctgggcaacagagcaaggctcggtctcccaaaaaaaaaaaaaaaaaaaagacacatggaagtaatttaaaaacacttaggaagatgtcatttcttcctatcaaggcgtcctccctttatgttttgtcgttatattgggaacgataaaaaaaatccttttttccgacccatgtggaccaggctggcctcgaactcgtgccctggaacccccgcctccgtgagggcccgagggcaggcgcaaccggcctgagccacaatggctccgggtgtcggggctgtcctttagtccctttgatcttacgcagggtgagggagccaatcaccagaggctcccccctgtcgtcacccagtccccagggccagtgagggccctgcgttccatggcgccccctggagggaggaaggggaactgtatctgagagttcagtatctgacaataaggaaaaggcatagtagatcagatggtgcctagtgttctggggagaagaaacaacggggttggggaatgcggagttgcagtttataatacaggcctcatgtataaggcagacctcatggggaaggtaacatctgtgcagagaaatggagatgagggctaggagccatgcaaatactggaacatgcttgccagcagaagtcgagaaacatggccggcgcagtggcccacacctgtaatcccaggactttgggaggccgaggcaggtagatcacgaggtcagcagttcgagaccagcccggccaacatggtgaaaccctgtctctactaaaaatacaaaaattagctgggtgtggtggcacacgcctgtaatcccagccacttgggagggtgaggtaggagaatcgcttgaacctgggaggtagaggttgcagtgatgcagtgagccgagaccacgccattgtactctcgcctgggcgacagagcgagactccatctcaaaaaaaaaaaaaaaaaaaaaaaaaaagcaaaaacaaacaggtgagattcattttgataaaatagctgatttaacctaatatacctaaaacatcataattttaacataatcaatagaaacatttttgcaagattttatgttattttttaccatacgacgtcttggaaatcttggtttggaccagccatgttcaactgctcagtagccatgtgtggccagaggcggccgtattggacagtgcagatggtgcatgagggtgttcgggcagtgggaacagccagtacagaggccctgtgggggcacatgcctgctgctacgggaacagtgaggagccccgtgtggctgcagtggagtgagagggagaaggtgggagatgtaaccaacagtctcatcattcattcattaaatccttttttttctttttttgagactgagtttcgctcttgttgcccaggctggagtgcaatggtgccatctcggctcaccacaacctccacctcttgagttcaagcgattctcctgcctcagccttccgagtagctgggattacaggcatgcgccaccatgcccggctaattttgtatttttagtagagctggggtttctccctgttggtcaggctggtctcgaactcccgacctcaggtgatctgcccgccttgacctcccaaagtgctgtgattacaggcttgagccactgctcccagtccattgaatgtgtgtatatatagttgaataaagaagacaccggagtttgttctgtatcttctcctttcaaattctgtgccatttgaattttttcctattccttttatatatttttaattgacaaattgtacatatttatcatgtacatattgttttgaaatatgtatataccgtagaatggctaaatcaagatcattaacatatgtattactttacctattttccttttttcgttgtgtctctgccaggtttcggtatcagaatgactctgacctcatagaatgagttagagagcagttgctcctcctcaattgtgtggaataatttcagtaggattggtgccgccttttctttacacgtctggtaggattcgactgtgaatccgtctagtctaaggttttttgtgctggttggtaggttttgtatgactaactcaattttggaactcatcgttggtttgttcagggtttccatttcttcctggttcaatcttgagaggttttatgtttccaggaatttctctatttcttctagttttctagtttgtgtgcatagaggcatgtggaatagtctcagggtttcttgtatatctgtgggtcagtggtaatgtcacctttgtcatttctgattgtgtttatttggatcttgtctttttttctttattaatctagctagtggtcttcccatgttatttatgctttcaaaaatatcaactttgtatgaattaacagcatttgccgtgacctggatgagaccggagactgttattctaagtgaagtaagtcaggaatggaaaaccaaacatcgtatgttctcactgatatgtgggagctaagctatgaggacgcaaaggcgtaagaacgatacaatggactttggggacttagggggacgagttggcgggggcgagggataaaatacaacaagtagggtgtagtgtatactgctcaggtgatgggtgcaccaaaatcacaaatcaccactaaagagcttatgtaaccacacaccacctgtaccccaataatttatggaataaataataaataaataatttttttaaaaaatcaactttgggtttcattgatcttttgtatggttttttacgtctccatttcattcaggtcagctccgatgttggtttttttttttcttctgctagctttggggttgatttgctcttgtttttctaattcctctaggtgtgatgttaggcggttcatttgagatctttctagcttcttagtgtagccctttagcactagaaacttcctttgagcactgttctagctgtgtcccagagattctgggatgttgtatgtttgttttcattagtttcagataatttttttatttctgccttaatttcagtctttacccaaaagtcatttggaagcaggttgtttaatttccatgatgactctaggccgggcatggtggctcatgcctgtaatcccagccacttgggaggctgaggcaggagaatcgcttgaatccaggaggcagaggtttcagtgagccaagatcacgccactgcactccagcccgggcgacagagtgaggctgcgtctcaaaaaaaaaaaaaaaaaaaaaaaattgccccttcttaagtttgcatttagatctcttctcctttgaccacttttaatttatcttcacttctgatatgacatttaatttttcattcattttctgtctattattgttccttttttaacttaaaaaaaaattatgtactttatgaatttctgtttcaaggtgtttttcccatctccaaatgcttatttgaaaatgtttcctttcctcttggttcatttcttctggtgtgtgtgtgcgcgcgcccgcgtgcatgtgtgtactcgggtctcattttctgctttcttcctgcagtacctcgtttatgggagatgcacttcgcttttgttatttttttagtagagagggggtttcactggtttagccagaacagtctcgatctcctgacctcgtgatccgcccacctcgggctcccaaagtgctgggattccaggagtgagccaccgcgcccggccgtccactttgcttcttgcagaggctgatggtttgagtaatttccgagattcatagctcgagcgcgccctgttctgtctatgcagtgaagggcagctttttgcatccacggctttttgttggcaaggaggaatgtgcagtggccagatttgtttcttccccttttgttgctgttgttgttgttgctgctgctgttattgttgttgttgttgtattttattttgtagcatcctaaagtgtcccctccttctatttcttatccttatccaggtagggtttagaaaagctaacttcaggggcaggggagagagagaaagagaggaagagaaaatgagaatgaatgacaatacatgaacccatgggtcaacctttatttcaaggcagcccaaaaggacggctctcccttctctttcactctcttctctaggtgtgaagctgatgcagcacaggcgagccccaaaattgaggcttagcccgggggggttcttggcttctcctagaaactaattcaagaagccgggcgcagtggctcacgcctgtaatcccagcactttgggaggctgaggcggatggatcacttgaggtaaggagttcgagaccagcctggccaacatgctgaaaaccccatctctactaaatatacaaaaattacccgggcatggggacgggtgcctgtaatcccagctgttcaggaggctgaggcaggggaatcgcttgaacccgggaggcggaggttgcagtgaacagagatcgtgtcactgcactccagcctgggtgatagagtgcgactccgtctgaaaaaaaaaaaaaagaattcaagggccggccggtggttttagacggcaacctttaccgaagcctcagtgcacagccacagcagagggacacacacctgtatcttttctaagactgggagaattttacaattgcttgaataattgaacagtgcctcgaggatgttacactaggttataaataaattcctgccgtgtttagctgaggcacgaacacaatgcccactgacaattccactttcctcgagggccattctttatgaaaggctgtaggagttccacgacattgttgattcctggattctccaagtctctagaacttgagaactacttttgtgtatttttttaacctttaagtccagagtttctaatgtccgttttatactactataaaatggtactatgtattctttatttatggtactatttacactttattttatacagactctggctccacaaaaaggttaaaaattagccaggtgcagtggtgcacatctgcggccccagctactcaggaggctgaggcagaaggattgcttgagctcggatggtcagggctgcaatgagctatgatcacacatcacatcaatgcactccagcctgggcaacagagtgagaccctgtctctaaaagaatagaagaggctgggcgcggtggctcacgcctgtcatcctaccactttgggagaccaaggcgagtggatcatttgaggccaggtgttcaagaccagcctggtcaacatggcgaaaccccatctcttggcaggcgactgtaatcccagctactcaggaggctgagataggagactcccttgaaccgacgaggcggaggttgcagtgagcgaagatcacaccactgcactccagcctgggcaacagagcaaggctcggtctccccaaaaaaaaaaaaaaaaaaaaaagacacatggaagtaatttaaaaacacttaggaagatgtcatttcttcctatcaaggcgtcctccctttatgttttgtcgttatattgggaacgataaaaaaaatccttttttccgacccatgtggaccaggctggcctcgaactcgtgccctggaacccccgcctccgtgagggcccgagggcaggcgcaaccggcctgagccacaatggctccgggtgtcggggctgtcctttagtccctttgatcttacgcagggtgagggagccaatcaccagaggctcccccctgtcgtcacccagtccccagggccagtgagggccctgcgttccatggcgccccctggagggaggaaggggaactgtatctgagagttcagtatctgacaataaggaaaaggcatagtagatcagatggtgcctagtgttctggggagaagaaacaacggggttggggaatgcggagttgcagtttataatacaggcctcatgtataaggcagacctcatggggaaggtaacatctgtgcagagaaatggagatgagggctaggagccatgcaaatactggaacatgcttgccagcagaagtcgagaaacatggccggcgcagtggcccacacctgtaatcccaggactttgggaggccgaggcaggtagatcacgaggtcagcagttcgagaccagcccggccaacatggtgaaaccctgtctctactaaaaatacaaaaattagctgggtgtggtggcacacgcctgtaatcccagccacttgggagggtgaggtaggagaatcgcttgaacctgggaggtagaggttgcagtgatgcagtgagccgagaccacgccattgtactctcgcctgggcgacagagcgagactccatctcaaaaacaaacaaacaaaaaaaaaaagcaaaaacaaacaggtgagattcattttgataaaatagctgatttaacctaatatacctaaaacatcataattttaacataatcaatagaaacgtttttgcaagattttatgttattttttaccgtacgacgtcttggaaatcttggtttggaccagccatgttcaactgctcagtagccatgtgtggccagaggcggccgtattggacagtgcagatggtgcatgagggtgttcgggcagtgggaacagccagtacagaggccctgtgggggcacatgcctgctgctacgggaacagtgaggagccccgtgtggctgcagtggagtgagagggagaaggtgggagatgtaaccaacagtctcatcattcattcattaaatccttttttttctttttttgagactgagtttcgctcttgttgcccaggctggagtgcaatggtgccatctcggctcaccacaacctccacctcttgagttcaagcgattctcctgcctcagccttccgagtagctgggattacaggcatgcgccaccatgcccggctaattttgtatttttagtagagctggggtttctccctgttggtcaggctggtctcgaactcccgacctcaggtgatctgcccgccttgacctcccaaagtgctgtgattacaggcttgagccactgctcccagtccattgaatgtgtgtatatatagttgaataaagaagacaccggagtttgttctgtatcttctcctttcaaattctgtgccatttgaattttttcctattccttttatatatttttaattgacaaattgtacatatttatcatgtacatattgttttgaaatatgtatataccgtagaatggctaaatcaagatcattaacatatgtattactttacctattttccttttttcgttgtgtctctgccaggtttcggtatcagaatgactctgacctcatagaatgagttagagagcagttgctcctcctcaattgtgtggaataatttcagtaggattggtgccgccttttctttacacatctggtaggattcgactgtgaatccgtctagtctaaggttttttgtgctggttggtaggttttgtatgactaactcaattttggaactcatcgttggtttgttcagggtttccatttcttcctggttcaatcttgagaggttttatgtttccaggaatttctctatttcttctagttttctagtttgtgtgcatagaggcatgtggaatagtctcagggtttcttgtatatctctgggtcagtggaaatgtcacctttgtcatttctgattgtgtttatttggatcttgtctttttttctttattaatctagctagtggtcttcccatgttatttatgctttcaaaaatatcaactttgtatgaattaacagcatttgccgtgacctggatgagaccggagactgttattctaagtgaagtaactcaggaatggaaaaccaaacatcgtatgttctcactgatatgtgggagctaagctatgaggacgcaaaggcgtaagaatgatacaatggactttggggacttagggggacgagttggcgggggcgagggataaaatacaacaagtagggtgtagtgtatactgctcaggtgatgggtgcaccaaaatcacaaatcaccactaaagagcttatgtaaccacacaccacctgtaccccaataatttatggaataaataataaataaataatttttttaaaaaatcaactttgggtttcattgatcttttgtatggttttttacgtctccatttcattcaggtcagctccgatgttggttttttttttttcttctgctagctttggggttgatttgctcttgtttttctaattcctctaggtgtgatgttaggcggttcatttgagatctttctagcttcttagtgtagccctttagcactagaaacttcctttgagcactgttctagctgtgtcccagagattctgggatgttgtatgtttgttttcattagtttcagataatttttttatttctgccttaatttcagtctttacccaaaagtcatttggaagcaggttgtttaatttccatgatgactctaggccgggcatggtggctcatgcctgtaatcccagccacttgggaggctgaggcaggagaatcgcttgaatccaggaggcagaggtttcagtgagccaagatcacgccactgcactccagcccgggcgacagagtgaggctgcgtctcaaaaaaaaaaaaaaaaaaaaaaaaaattgccccttcttaagtttgcatttagatctcttctcctttgaccacttttaatttatcttcacttctgatatgacatttaatttttcattcattttctgtctattattgttccttttttaacttaaaaaaaaattctgtactttatgaatttctgtttcaaggtgtttttcccatctccaaatgcttatttgaaaatgtttcctttcctcttggttcatttcttctggtgtgtgtgtgcgcgcgcccgcgtgcatgtgtgtactcgggtctcattttctgctttcttcctgcagtacctcgtttatgggagatgcacttcgcttttgttatttttttagtagagagggggtttcactggtttagccagaacagtctcgatctcctgacctcgtgatccgcccacctcgggctcccaaagtgctgggattccaggagtgagccaccgcgcccggccgtccactttgcttcttgcagaggctgatggtttgagtaatttccgagattcatagctcgagcgcgccctgttctgtctatgcagtgaagggcagctttttgcatccacggctttttgttggcaaggaggaatgtgcagtggccagatttgtttcttccccttttgttgctgttgttgttgttgtattttattttgtagcatcctaaagtgtcccctccttctatttcttatccttatccaggtagggtttagaaaagctaacttcaggggcaggggagagagagaaagagaggaagagaaaatgagaatgaatgacaatacatgaacccatgggtcaacctttatttcaaggcagcccaaaaggacggctctcccttctctttcactctcttctctgcgtgtgaagctgatgcagcacaggcgagccccaaaattgaggcttagcccgggggggttcttggcttctcctagaaactaattcaagaagccgggcgcagtggctcacgcctgtaatcccagcactttgggaggctgaggcggatggatcacttgaggtaaggagttcgagaccagcctggccaacatggtgaaaccccatctctactaaatatacaaaaattacccgggcatggggacgggtgcctgtaatcccagctgttcaggaggctgaggcaggggaatcgcttgaacccgggaggcggaggttgcagtgaacagagatcgtgtcactgcactccagcctgggtgatagagtgcgactccgtctgaaaaaaaaaaaaaaagaattcaagggccggccggtggttttagacggcaacctttaccgaagcctcagtgcacagccacagcagagggacacacacctgtatcttttctaagactgggagaattttacaattgcttgactaattgaacagtgcctcgaggatgttacactaggttataaataaattcctgccgtgtttagctgaggcacgaacacaatgcccactgacaattccactttcctcgagggccattctttatgaaaggctgtaggagttccacgacattgttgattcctggattctccaagtctctagaacttgagaactacttttgtgtatttttttaacctttaagtccagagtttctaatgtccgttttatactactataaaatggtactatgtattctttatttatggtactatttacactttattttatacagactctggctccacaaaaaggttaaaaattagccaggtgcagtggtgcacatctgcggccccagctactcaggaggctgaggcagaaggattgcttgagctcggatggtcagggctgcaatgagctatgatcacacatcacatcaatgcactccagcctgggcaacagagtgagaccctgtctctaaaagaatagaagaggctgggcgcggtggctcacgcctgtcatcctaccactttgggagaccaaggcgagtggatcatttgaggccaggtgttcaagaccagcctggtcaacatggcgaaaccccatctcttggcaggcgactgtaatcccagctactcaggaggctgagataggagactcccttgaaccgacgaggcggaggttgcagtgagcgaagatcacaccactgcactccagcctgggcaacagagcaaggctcggtctccccaaaaaaaaaaaaaaaaaaaaaagacacatggaagtaatttaaaaacacttaggaagatgtcatttcttcctatcaaggcgtcctccctttatgttttgtcgttatattgggaacgataaaaaaaatccttttttccgacccatgtggaccaggctggcctcgaactcgtgccctggaacccccgcctccgtgagggcccgagggcaggcgcaaccggcctgagccacaatggctccgggtgtcggggctgtcctttagtccctttgatcttacgcagggtgagggagccaatcaccagaggctcccccctgtcgtcacccagtccccagggccagtgagggccctgcgttccatggcgccccctggagggaggaaggggaactgtatctgagagttcagtatctgacaataaggaaaaggcatagtagatcagatggtgcctagtgttctggggagaagaaacaacggggttggggaatgcggagttgcagtttataatacaggcctcatgtataaggcagacctcatggggaaggtaacatctgtgcagagaaatggagatgagggctaggagccatgcaaatactggaacatgcttgccagcagaagtcgagaaacatggccggcgcagtggcccacacctgtaatcccaggactttgggaggccgaggcaggtagatcacgaggtcagcagttcgagaccagcccggccaacatggtgaaaccctgtctctactaaaaatacaaaaattagctgggtgtggtggcacacgcctgtaatcccagccacttgggagggtgaggtaggagaatcgcttgaacctgggaggtagaggttgcagtgatgcagtgagccgagaccacgccattgtactctcgcctgggcgacagagcgagactccatctcaaaaaaaaaaaaaaaaaaaaaaaaaaaaaaaagcaaaaacaaacaggtgagattcattttgataaaatagctgatttaacctaatatacctaaaacatcataattttaacataatcaatagaaacgtttttgcaagattttatgttattttttaccgtacgacgtcttggaaatcttggtttggaccagccatgttcaactgctcagtagccatgtgtggccagaggcggccgtattggacagtgcagatggtgcatgagggtgttcgggcagtgggaacagccagtacagaggccctgtgggggcacatgcctgctgctacgggaacagtgaggagccccgtgtggctgcagtggagtgagagggagaaggtgggagatgtaaccaacagtctcatcattcattcattaaatccttttttttctttttttgagactgagtttcgctcttgttgcccaggctggagtgcaatggtgccatctcggctcaccacaacctccacctcttgagttcaagcgattctcctgcctcagccttccgagtagctgggattacaggcatgcgccaccatgcccggctaattttgtatttttagtagagctggggtttctccctgttggtcaggctggtctcgaactcccgacctcaggtgatctgcccgccttgacctcccaaagtgctgtgattacaggcttgagccactgctcccagtccattgaatgtgtgtatatatagttgaataaagaagacaccggagtttgttctgtatcttctcctttcaaattctgtgccatttgaattttttcctattccttttatatatttttaattgacaaattgtacatatttatcatgtacatattgttttgaaatatgtatataccgtagaatggctaaatcaagatcattaacatatgtattactttacctattttccttttttcgttgtgtctctgccaggtttcggtatcagaatgactctgacctcatagaatgagttagagagcagttgctcctcctcaattgtgtggaataatttcagtaggattggtgccgccttttctttacacatctggtaggattcgactgtgaatccgtctagtctaaggttttttgtgctggttggtaggttttgtatgactaactcaattttggaactcatcgttggtttgttcagggtttccatttcttcctggttcaatcttgagaggttttatgtttccaggaatttctctatttcttctagttttctagtttgtgtgcatagaggcatgtggaatagtctcagggtttcttgtatatctctgggtcagtggaaatgtcacctttgtcatttctgattgtgtttatttggatcttgtctttttttctttattaatctagctagtggtcttcccatgttatttatgctttcaaaaatatcaactttgtatgaattaacagcatttgccgtgacctggatgagaccggagactgttattctaagtgaagtaactcaggaatggaaaaccaaacatcgtatgttctcactgatatgtgggagctaagctatgaggacgcaaaggcgtaagaatgatacaatggactttggggacttagggggacgagttggcgggggcgagggataaaatacaacaagtagggtgtagtgtatactgctcaggtgatgggtgcaccaaaatcacaaatcaccactaaagagcttatgtaaccacacaccacctgtaccccaataatttatggaataaataataaataaataatttttttaaaaaatcaactttgggtttcattgatcttttgtatggttttttacgtctccatttcattcaggtcagctccgatgttggttttttttttttcttctgctagctttggggttgatttgctcttgtttttctaattcctctaggtgtgatgttaggcggttcatttgagatctttctagcttcttagtgtagccctttagcactagaaacttcctttgagcactgttctagctgtgtcccagagattctgggatgttgtatgtttgttttcattagtttcagataatttttttatttctgccttaatttcagtctttacccaaaagtcatttggaagcaggttgtttaatttccatgatgactctaggccgggcatggtggctcatgcctgtaatcccagccacttgggaggctgaggcaggagaatcgcttgaatccaggaggcagaggtttcagtgagccaagatcacgccactgcactccagcccgggcgacagagtgaggctgcgtctcaaaaaaaaaaaaaaaaaaaaaaaaaattgccccttcttaagtttgcatttagatctcttctcctttgaccacttttaatttatcttcacttctgatatgacatttaatttttcattcattttctgtctattattgttccttttttaacttaaaaaaaaattctgtactttatgaatttctgtttcaaggtgtttttcccatctccaaatgcttatttgaaaatgtttcctttcctcttggttcatttcttctggtgtgtgtgtgcgcgcgcccgcgtgcatgtgtgtactcgggtctcattttctgctttcttcctgcagtacctcgtttatgggagatgcacttcgcttttgttatttttttagtagagagggggtttcactggtttagccagaacagtctcgatctcctgacctcgtgatccgcccacctcgggctcccaaagtgctgggattccaggagtgagccaccgcgcccggccgtccactttgcttcttgcagaggctgatggtttgagtaatttccgagattcatagctcgagcgcgccctgttctgtctatgcagtgaagggcagctttttgcatccacggctttttgttggcaaggaggaatgtgcagtggccagatttgtttcttccccttttgttgctgttgttgttgttgtattttattttgtagcatcctaaagtgtcccctccttctatttcttatccttatccaggtagggtttagaaaagctaacttcaggggcaggggagagagagaaagagaggaagagaaaatgagaatgaatgacaatacatgaacccatgggtcaacctttatttcaaggcagcccaaaaggacggctctcccttctctttcactctcttctctgcgtgtgaagctgatgcagcacaggcgagccccaaaattgaggcttagcccgggggggttcttggcttctcctagaaactaattcaagaagccgggcgcagtggctcacgcctgtaatcccagcactttgggaggctgaggcggatggatcacttgaggtaaggagttcgagaccagcctggccaacatggtgaaaccccatctctactaaatatacaaaaattacccgggcatggggacgggtgcctgtaatcccagctattcaggaggctgaggcaggggaaccgcttgaacccgggaggcggaggttgcagtgagcagagatcgtgtcactgcactccagcctgggtgatagagtgaggctgagaatcaaaagaagaaaaaaaaaaaaaaaaaaacaattcaagggcaggccggtggttttagacggcaacttttactgaagcgtcagtgcacagccacagcagagggacacacacctgtatcttttctaagactgggagaattttacaattgcttgaataattgaacagtgcctcgaggatgttacactaggttataaataaattcctgccgtgtttagctgaggcacgaacacaatgcccactgacaattccactttcctcgagggccattctttatgaaaggctgtaggagttccacgacattgttgattcctggattctccaagtctctagaacttgagaactacttttgtgtatttttttaacctttaagtccagagtttctaatgtccgttttatactactataaaatggtactatgtattctttatttatggtactatttacactttattttatacagactctggctccacaaaaaggttaaaaattagccaggtgcagtggtgcacatctgcggccccagctactcaggaggctgaggcagaaggattgcttgagctcggatggtcagggctgcaatgagctatgatcacacatcacatcaatgcactccagcctgggcaacagagtgagaccctgtctctaaaagaatagaagaggctgggcgcggtggctcacgcctgtcatcctaccactttgggagaccaaggcgagtggatcatttgaggccaggtgttcaagaccagcctggtcaacatggcgaaaccccatctcttggcaggcgactgtaatcccagctactcaggaggctgagataggagactcccttgaaccgacgaggcggaggttgcagtgagccaagatcacaccactgcactccagcctgggcaacagagcaagcctcggtctcccaacaaaaaaaaaaaagaaagatacattgaagtaatttaaaaacacttaggaagatgtcatttcttcctatcaaggcgtcctccctttctgttttgttgttatattgggaacgataaaaaaatttttttttcaacccatgtggaccaggttggcctcgaactcgtgccctcgaaccctcgcctaccctgagggtccgagggcccgcgcaaccggccggagccacaatggctccgggtgtcggggctgtcctgtaggccctttgatcttacgcagggtgagggagccaatcaccagaggctcacccctgacgtcacccagtccccagggccagtgagggccctgcgttccatggcgccccctggagggaggaaggggaactgtagctgagagttcagtatctgacaataaggaaaaggcatagtagatcagatggtgcctagtgttctggagagaagaaacaacggggttggcgaattggcagttgcactttataatacaggcctcatgtataaggcagacctcatggggaaggtaacatctgtgcagagaaatggagatgagggctaggagccatgcaaatactggaacatgcttgccagcagaagtcgagaaacatggccggcacagtggcccacacctgtaatcccaggactttgggaggccgaggcaggtagatcacgaggtcagcagttcgagaccagcctggccaacatggtgaaacactgtctctacaaaaatacaaaaattagctgggtgtggtggcacacgcctataatcccagtcacttgggagggtgaggtaggagaatcgcttgaacctgggaggtagaggttgcagtgatgcagtgagctgagaccacgccattgtactctagcctgggcgacagagcgagactccatctcaaaaaaaaaaaaaaaaaaaaaaaagcaaaaacaaacaggtgacattcattttgataaaatagctgatttaacctaatatacctaaaacatcataattttaacataatcaatagaaacatttttgcaagattttatgttatttttttaccatacgacgtcttggaaatcttggtttggaccagccatgttcaactgctcagtagccatgtgtggccagaggcggccgtattggacagtgcagatggtgcatgagggtgttcgggcagtgggaacagccagtacagaggccctgtgggggcacatgcctgctgctacgggaacagtgaggagccccgtgtggctgcagtggagtgagagggagaaggtgggagatgtcaccaacggtctcatcattcattcattaaatccttttttttttttttttttttttttgagactgagtttcgttcttgtttcccaggctggagtgcaatggtgccatctcggctcaccacaacctccacctcttgagttcaagcgattctcctgcctcaccctcccgagtagctgggattacaggcatgcgtcaccatgcccggctaattttgtatttttagtagagctggggtttctctctgttggtcaggctggtctcgaactcccgacctcaggtgatctgcccgccttgacctcccaaagtgctgtgattacaggcttgagccactgctcctggtccattgaatgtgtgtatatatagttgaataaagaagagactggagtttgttctgtatcttctcctttcaaattctgcgccagttgaattttttcctcttccttttatatatttttaattgacaaattgtacatatttatcatgtacatattgttttgaaatatgtatataccgtagaatggctaaatcaagatcattaacatatgtattactttacctattttccttttttcgttgtgtctctgccaggtttcggtatcagaatgactctgacttcatagaatgagttagagagcagttgctcctcctcaattgtgtggaataatttcagtaggattggtgccggcttttctttacacatctggtagaattcgactgtgaatccgtctagtctaaggttttttgtgctggttggtaggtcttgtatgactaactcaattttggaactcatcgttggtttgttcagggtttccatttcttcctggttcaatcttgagaggttttatgtttccaggaatttatctatttcttctagttttctagtttgtgtgcatagaggcatgtggaatagtctcagggtttcttgtatgtctgtgggtcagtggtaatgtcacctctgtcatttctgattgtgtttatttggatcttgtcttttttcctttattaatctagctagtggtctttccatgttatttgtgctttcgaaaatatcaactttgtatgaattaacagcatttgccgtgacctggatgagaccggagactattattctaagtgaagtaactcaggaatggaaagccaaacatcgtatgttctcactgatatgtgggagctaagctatgaggacgcaaaggcgtaacaatgatacaatggactttggggacgtagggggacgagttggcgggggcgagggataacagacaacaaatagggtgtagtgtatactgctcaggtgatgggtgcaccaaaatcacaaatcaccactaaagagcttatgttaccaaataccacctgtaccccataatttatggaagaaataataaataaataatttttttaaaaaatcaactttgggtttcattgatcttttctatgattttttacatctcaatttcattcagctcagctctgattttggtgtttttttttcttctgctagctttggggttgatttgctcttgtttttctaattcctctaggtgtgatgttaggctgttcatttgagatctttctagcttcttgatgtagccacttagcactataaacttcctttgagcactgttctagctgtgtcccagagattctgggatgttgtatgtttgttttcattagtttcaaataatttttttatttctgccttaatttcagtctttacccaaaagtcatttggaagcaggttgtttaatttccatgttgactctaggccgggcatggtggctcatgcctgtaatcccagccacttgggaggctgaggcaggagaatcgcttgactccaggaggcagaggtgtcagtgagccaagatcacgccactgcactccagcccgggcaacagagtgaggctgcgagcccgggcggcagagtgaggctgcgtctcaaaaaaaaaaaaaaaaaaaaaaaattgccccttcttaagtttgcatttagatctcttctcctttgatcacttttaatttatcttcacttctgatatgacattttattttttattcattttctgcctgtttattattgttcctcttttaacttaaaaaaaaaaacatgtctgtactttatgaatttctgtttcaaggtgtttttcccatctccaaatgcttacttgaaaatatttcctttcctcttggttcatttcttctggtgtgtgtgtgcgcacgcccgcgtgcatgtgtgtactcgggtctcattttctgctttcttcctgcagtacctcgtttatgggagatccacttcgcttttgttatttttttagtagagagggggtttcactggtttagccagaacagtctcgatctcctgacctcgtgatccgcccacctcgggctcccaaagtgctgggattccaggagtgagccaccgcgcccggccgtccactttgcttcttgcagaggctgatggtttgagtaatttccgagattcatagctcgagcgcgccctgttctgtctatgcagtgaagggcagctttttgcatccacggctttttgttggcaaggaggaatgtgcagtggccagatttgtttcttccccttttgttgctgttgttgttgttgtattttattttgtagcatcctaaagtgtcccctccttctatttcttatccttatccaggtagggtttagaaaagctaacttcaggggcaggggagagagagaaagagaggaagagaaaatgagaatgaatgacaatacatgaacccatgggtcaacctttatttcaaggcagcccaaaaggacggctctcccttctctttcactctcttctctgcgtgtgaagctgatgcagcacaggcgagccccaaaattgaggcttagcccgggggggttcttggcttctcctagaaactaattcaagaagccgggcgcagtggctcacgcctgtaatcccagcactttgggaggctgaggcggatggatcacttgaggtaaggagttcgagaccagcctggccaacatggtgaaaccccatctctactaaatatacaaaaattacccgggcatggggacgggtgcctgtaatcccagctattcaggaggctgaggcaggggaaccgcttgaacccgggaggcggaggttgcagtgagcagagatcgtgtcactgcactccagcctgggtgatagagtgaggctgagaatcaaaagaagaaaaaaaaaaaaaaaaaacaattcaagggcaggccggtggttttagacggcaacttttactgaagcgtcagtgcacagccacagcagagggacacacacctgtatcttttctaagactgggagaattttacaattgcttgaataattgaacagtgcctcgaggatgttacactaggttataaataaattcctgccgtgtttagctgaggcacgaacacaatgcccactgacaattccactttcctcgagggccattctttatgaaaggctgtaggagttccacgacattgttgattcctggattctccaagtctctagaacttgagaactacttttgtgtatttttttaacctttaagtccagagtttctaatgtccgttttatactactataaaatggtactatgtattctttatttatggtactatttacactttattttatacagactctggctccacaaaaaggttaaaaattagccaggtgcagtggtgcacatctgcggccccagctactcaggaggctgaggcagaaggattgcttgagctcggatggtcagggctgcaatgagctatgatcacacatcacatcaatgcactccagcctgggcaacagagtgagaccctgtctctaaaagaatagaagaggctgggcgcggtggctcacgcctgtcatcctaccactttgggagaccaaggcgagtggatcatttgaggccaggtgttcaagaccagcctggtcaacatggcgaaaccccatctcttggcaggcgactgtaatcccagctactcaggaggctgagataggagactcccttgaaccgacgaggcagaggttgcagtgagccaagatcacaccactgcactccagcctgggcaacagagcaagcctcggtctcccaaaaaaaaaaaaaaaagaaagatacattgaagtaatttaaaaacacttaggaagatgtcatttcttcctatcaaggcgtcctccctttctgttttgttgttatattgggaacgataaaaaaatttttttttcaacccatgtggaccaggttggcctcgaactcgtgccctcgaaccctcgcctaccctgagggtccgagggcccgcgcaaccggccggagccacaatggctccgggtgtcggggctgtcctgtaggccctttgatcttacgcagggtgagggagccaatcaccagaggctcccccctgtcgtcacccagtccccagggccagtgagggccctgcgttccatggcgccccctggagggaggaaggggaactgtagctgagagttcagtatctgacaataaggaaaaggcatagtagatcagatggtgcctagtgttctggagagaagaaacaacggggttggcgaattggcagttgcactttataatacaggcctcatgtataaggcagacctcatggggaaggtaacatctgtgcagagaaatggagatgagggctaggagccatgcaaatactggaacatgcttgccagcagaagtcgagaaacatggccggcacagtggcccacacctgtaatcccagcactttgggaggccgaggcaggcagatcacgaggtcagcagttcgagaccagcctggccaacatggtgaaaccctgtctctactaaaaatacaaaaattagctgggtgtggtggcacactcctgtaatcccagccacttgggagggtgaggtaggagaatggcttgaacctgggaggtagaggttgcagtgatgcagtgagctgagaccacaccattgtactctagcctgggcgacagagcgagactccatctcaaaaaaaaaaaaaaaaaaaagcaaaaacaaacaggtgagattcattttgataaaatagctgatttaacctaatatacctaaaacatcataattttaacataatataaacatttttgcaagattttatgttattttttaccatacgacgtcttggaaatcaagaaacagagcaagcctcggtctcccaaaaaaaaaaaaaagatacattgaagtaatttaaaaacacataggaagatgtcatttcttcctatcaaggcgtcctccctttatgttttgttgttatattgggaacgataaaaaaatttttttttcaacccatgtggaccaggttggccttgaactcgtaccctcgaacccctgcctccctgagggcccgagggcaggcgcatccagccggagccacagtggctccgggtgtcggggctgtcctttcttccctttctccctctcgtctcctgtctcccgtctccctctccccacggtctccctctccctctccctctcctgtctcccgtctcccgtctccctctccacatggtctccctctccctctctttccacggtctccgtctgatgcccagccgaagctgcactgtactgctgccatctcactgcatcctccctgcctgattctcgtgcctcagcctgccgagtgcctgccattgcaggcacacgccgccacacctgactggttttcgtatttttttggtggagacggggtttcgctgtgttggccgggctggtctccagctcctaactgcgagtgatccgccagcctcggcctccccaggtgcggggattgcagatggagtctcgttcactcagtgctcaatggtgcccaggctggagtgcagtggcgtgatctcggctcgctacaacctccacctcccagccgcctgccttggcctcccaaagtgccgagattgcagcctctgcccggccgccaccccgtctgggaagtgaggagcgtctctgcctggccgcccatcgtctgggatgtgaggaatccctctgcctggctgcccagtctggaaagtgaggagcgtctctgcccggccgccatcccatctaggaagtgaggagcgcctctgcccggccgcgaccctgtctgggaggtgaggagcgtctctgcccagccgccccgtctgagaagtgaggagcccctctgcccggcagccgccccgtctgagaagtgaggagcccctccgcccggcagccaccccatctgggaagtgaggagcgtctccgcccggcagccaccccgtccgggagggaggtggggggggggtggtcagccccccgcccggccagccgccccgtccgggagggaggtgggggggtcagccccctgcccgtccagccgccccgtccgggaggtgaggggcgcctctgcctggccgcccctactgggaagtgaggggcccctctgcccggccaccaccccgtctgggaggtgtacccaacagctcattgagaacgggccatgatgacaatggcggttttgtggaatagaaaggggggaaaggtggggaaaagattaagaaatcgcatggttgccgtgtctgtgtagaaagaagtagacatgggagacttttcattttgttctgtactaagaaaaattcttctgccttgggatcctgttgatctgtgaccttacccccaaccgtgtgctctctcaaacatgtgctgtgtccactcagggttaaatggattaagggcggagcaagatgtgctttgttaaacagatgcttgaaggcagcatgctccttaagagtcatcaccactccctaatcgcaagttcccagggacacaaacactgcggaaggccacagggtcctctgcctaggaaaaccagagacctttgttcacttgtttatctgctgaccttccctccactattgtcctatgaccctgccaaatccccctctgcgagaaacacccaagaatgattaaaaaaaaaaaagaaagtgttaatgacagatttgcctccattaaaagccaagaaagtcaaattattcaaattctgtctagggtatatatgaaagatttaaatgtaaaataatgttgtgaatttcaacacatttacttcatttttcagtatttttcaactagtttagcattccaggaaaaataaatttagaaaaaatatataaaaacttgcgcagggcacagtggctcatgcctgtaatcccagcacaggcctttgggaggccaaggtgggtggatcacttgagcctgggagtttaagactagcctgagcaacatggggagagcctgtctctacaaaaataatttaggaattagctaggcatggtagtgtgtgcttgtagtcccagctactcaggaggctgaggcaggaggatcccttgagcccaggagtttgttactgcagtgagctatgatctcaccaccacactccagcctgggcaatggagcaagaacccctctccttaaaaaaaaaaaaagcaagtatatgggggcacatacatttcctttgaaatagcagtctgatgtggcatgagactggcctttttaaaaaatttgatattttgttcatcattgattttttttgcattgattttgatttttaaaaaatgttgcattattattgttattgttattattgtcactctgtcacccaggctggagtgcagagtctccctgagttcaagtgattctcctgcttcagcctcccaagtagctggaactacaggcgtgtgccacctcaccctaattttattttttatttttattttttttgtagagacagggtttcgccatgttggccaggctggtctcaaacttccgacctcaagtgatccacccaccttgggctcccaaagtgctgggattacaggcgtgaaccaccgcgcctggccaatattgcattaaatattcttttatcttgattgctgcatttggggcacacatttacatttggtactgggtgaatacagctccctctggccaggctccagccagccccactcctccagggtgaagtccaccgccacatccttgaaggtcactgattcctgcaagggccagtttcattctgtggagtggcacgtccttctggaacttgggggcagaagtgtcaggggtcaagagcccacaacagccccctgggctggaacattctgattgtgcagaattgggatgcctgaatccaactggcctatgggaacctatctaaggcagaaactcgcccataggcaccttggtagaaagtagaacaaggagccctttcacatgactctttactgccatctgttgggaagtcattgtaatataccaattaatttagtatatgacagtttatcaaactgcctgcaaactgccaccaatgtatgaggtataaggtgggagtcctgcctgggatgaggcacacttgtgcagtgcataacctgcacagctctaagtgacagccctaaaaaatgctttttttttgagatggagtctcgctctatcccccaggctggagtgcagtggcgcaatctcggctcactgcaagctccacctcccgggttcacgccattctcctgcctcagcctcccgagtagctgggaccacaggcgcccgccaccacgcccggctaattttttgtatttttagtagagacggggtttcaacgtattagccaggatggtctcgatctgacctcgtgatccgcctgcctcagcctcccaaagtgctgggattacaggcatgagccaccgcgctcagcctaagaaacacttaaagaaaaatccgtcaagccgttttgtgcaggagatattcgcaagtcccattctatcccagaccccatccctgatcctcacccccattcctgactccagagatgaggctcagggatgaagcaaaaccatccattgcccactttgcctggtaactgaaaggctgcagtgttcgatgaaaaatgtttagactgcgcgacatggtcccagctcagagcattctgcctctgcctcctgcccctgggcactgcccggctcccctctcctcataccccctttcccagtattggaagagtcaggagaccttgagatcatgcacagggatgaagagggcccactggagtccacaaagttatcctggggaagaggaagcccagactcacctggccctcggccatcaaggtcccattggccattgctgggttctgggcatgtgcctctgggagaagggttcacgccagggcccgaagagctggaggaggagaccacagcagaaaaagggtcatttgtgaccctgacagacagatgctttccccaagactcctggtcacggaaggggccatggtcccctaagagtcaaagcaaagtcccaggacaggccacctgaggcccccattccataccagtgacaacagccagcaaccatgaggctgtctcacctccccgacacaacagctctcggacgtgggaacgatggttacccctagatgaggacattgaggcacaagaggtcaagacttgctcaagttcatggagacaaaaagtttcagagaagtctagccacagggccacccctatcttttatatatatatatatatatattgttttttttttttttagatggattctcactcagtgtcccaggctggctggagtgcagtggcgccatctcggctcactgcaacctccgcctcccaggatcaagcaattctcttgcctcagcttcctgaatagctgggattacaagcacctgccaccatgcctggctaatatttacatttttagtagagatggggtttcaccatgttggcaaggctggtctcgaactcctgacctcaggtgatctacccacctcgggctccaaaattgctgggattttaggcctgagccactgtgcctgggccaggggttcttatttatttatataatttattattttttaataatacagacagggtctctctatgttgcccaggctggtcgcgtactcctgggctcaagcaatcctcccacctcggcctcccaaagtgctgggattacaggcatgagccaccacacccagccttggcaaagattcttaaaactttattccataaactgggacttcctgcctggtggggtagacaggctgtataacagcccccagagatatccctggaacctacagatcttatcttatatggaaaagagactttgcggaagggattaagtgaaggatctttagatggggggaattatcctggattatctgggcgggcactaaatgccttcacaagtgtccttataagagggggcagaggagagtctgacacagggcagaagaaggccatgcaccagaagcagagagcagcagaggctgagagagaggacgctacactgctggctttgatgacagaggaaagggctacaagccaaggaaagcaggcccctggaaactggcaacgaggcagcgaaacagatccatccctggagcctctggagggagcatggccgtgctgaccccttgatccctttgaatcccgcttccaacttctggcctccaggattgtaatataataaaattgtgtcattttaagtgtgtggcaatttgttacagcaccatgggaaactaatacagtccacagaatgaaaagatgcagcacctcacacacatttcccaggcgagaagccatacacatccccggctacacagaacacacacacctgaatgctgaaactagtgcatgaggtgttttttttttttgagacagagtctctatctgttgcccaggctggagtgcaatggcgtgatctcggcttactgcaagctccacctcccaggttcacaccattctcctgcctcagcctcctgagtagctgggactacaggaacctgccatcactcctggctaattttttttttttttaggagagacagggtttcaccatgttagccaggatggtctcaatctcctgacctcatgattcacctgcttcagcctcccaaattgctgggattacaggtgtgagccaccacacctggcctagtgcacgaggttttgatgagaaaatgaggaagagagtcttaactttatccccatgaatcacttgttaattacaaaaagaacagggtaacttttttatcttatttaaataattaatttattaatttggagacagggtttcgctcttgttgcccaggctggagtgcagtgactcaatctcagctcactgcaacctccacttcctgggttcacacaattctcctgcctcagcctcccgaatagctgggattacaggtatccaccatgacacctggctaattttttgtatttttagtagagatggggtttcaccatgttggccagactggtctcgaactcctgacctcaggtgatccacccgcctcagcctcccaaagtgctgggattacaggcgtgagccaccacacctggccttattttatttttgagacagagtcttgctctgtcacccaggctggagtgcagtgaggcgatcttggttcactgaaacttccacctcccgggtttcaagtgattctcaggcctcagcttcctgagtagctggggttacaggagcccgccaccacgcccagctgatttttgtattattattattattattattatttgagatggagtctcgctctgccacctaggctggagtgcagtggcgtgatctcggctcactgcaacctccacctcccagcttcaagcgattctcctgcctcagcctcccaagtagctgggattacaggtgtgtgccaccacaccaggctaatttttttgtatttttagtagagatggggtttcaccatgttggccaggctggtctcgaactcctgacctggggttatccgcccccctcggcctcccaaagtgctgggattacaggtgtgagccaccgcgcccagaccagggaaactagagaggagaaacttggcagatgccaccttacccatgtgagtgaggctgatgtggtgtgtggtgggacaagccgagcccagggtccccagtctgatgaggagacagcatcactcctagggcatccctgccaaaagcgtgtgacctaaatctaactatgaagaagcaccagacaaacccaaactgagggacatgcaagtacatggtctgtaatcttcggaacttccaaaagaagactgaaaaccggttccagactgaaggagacccaacaaagcgagcaatgtgtgacctaggatttcctttggccattaaggacattattggagccagctgtaatcccagcactttgggaggctgaggtgggaggatcgcttgagcccaagagtttgagaccagcccgggcaacacagtgagaccccgtttctacaaaaaaaaattaaaaaaattagccgggcatggtggtgtgtgcttgtaatcccgactactcagaagactgaagtgggaggatctcttgagcccaggaggtcgaggctgcatgagctatgattgtgccactgcactccagcctgggtgacagagcaagactctgtctccaaaaaaagaaaaagaaaaagaaagacaaaaagacattattggaagaatcatcaaaaatttgaataaagtctatagattagctattagtattacatcaatattaatttcctcattgtgatcgtggtgctatggttatgtaagaaaatgaccttgtctttggaaaacacagagattcgctagaaggactggggagtgggagggcgcagagaccgagagagggcgacagagacccacagagagggggagagagacgcagagagagggggtacagagacccagcgagagggggacaggacctggggcggcgagggtgaggggaagatcagagagagctgggagacccagagagggaagaacagatgctcaggataaggggagccgagaccgagtctgtgcctgtgcagtgctgctttcgggttctggggtcagaatctgggttgcagctctgccagcctgagagaaatcgcggagtctccccgactctcagtttcttcaactgcaaagtgaggaaaggtaggttccccttcctagggatcgcagcagtcccacgctccgccggactcctggcaaacagcagacgcccaattcctgcgcgccgagtcgtctgagccgcactgatactaggtgggactcagggaatgacaagagggggcggggcgtcacccacagcgccctccccactcccaaccagacccaacttgggcccgcccccggagcttctgctagcctgtctggcccggcctgcacccacctgctccggtcgggtccgcgagttccgtgcgtccaggcggattccgctggacagccaggccttcccttcctccgccgggtcccggaacgcgcctgagcagtccctgtctcggaactgtaagtcccggtaccttaaacgcggcatcgcagctggactacatttcccagaaaccattgaggctcttgctcctcccggcctaagggctctgactgcgagggaatgctgggaaatggagtctgggagcaggatacggggcaggagtaagactgtatttagatacatacacaacagcttttggaggaaaactggtatttgggacatgcctgactgtactggcacgcgaatatccctgttttaggcagaggcgatgccattgtccatttaatccaaatttctcataccatggctgaagtcttcaggacagataaaatttggccctgtgtaaactgatggtgaatgaattgaaccactgttactcaatttccctaggcatctgccttcctatttgcctcagtttcacccaccacttcttaaagggcagtgtgatacaggcaatggagcctgttctgggagctgggagatgtgtgttcaggagtgtaaggatggtttgatattaggacattatgcaatttatcttttgacctttctgaatatatcaatatgcaagcatatctatagatacactaaaaagacttttaataacatccagtaaccctagatgctgagaaagcttacaaaaaaattctgtaaccagtcatttctagataagcttaataaattaagcatatattcatattgaacaacaatagcgacaatgttaaagaattactggcttcttattgtgtttatgtatgtccatataatcaaaacctcatatcaagcttaatcgtaaaacactaaaagaattgccaggctgggtgcagtggttcacacctgaaatcccagcactttgggatttcaaagagggaagctaaagagggaggatcacttgcactcagaagtttgagaccagcctgggcaacatagctagacccccatctctacagaaaatataaaagttagccaagcatagtggtgagcacctgtagacccagctactcggcaggctaaggcaggaggatcagttgagcccaggagggcaaggctgcagtgagctgtgatggtgccagcctgggcaagagagcaagactctgtctcaaaaaaaaaaaaaagtgtaaaccgtatatgtcctcatgagaaaaagctagatggctcattgccagaatgaaataataataggtgttacttattgacaacacgttgtgagctttactagttgactgagctgacaccaccaccctatgaagaaggcattgctctccctattttacagacaaggacactgagatagaggatttatgtcatccccccaagctcccagagctagtcgaggacagaggcaggacttgaatccaggttcagcccatatttgcaaccacttaattttactgctgccaagtttgctcctttttccttgtgttccgataaccaaatgctccaagcacaggttgtactgtcagctgaggctctagagtcagggtggcatggagcagaacctcagctaatctataataggcatgtcacactggagacaaaggtgactccatcttggatggttatccgccatgttgacttctgattaatcccagtcctgggaattccttctgatttctactttacttactgtccctagtgtaagaacatgtcaaccttgatgttatcacacaaattataggctacgacacagcatacagaacattgcctgttctgtaggcttaattgtcttaacccttaattgtcttgctaaagcaagtattgcccttccctatgtgagataagccttaggattagggagtaactgtgtggagatagacctgtcttgctgccacccaagaccatgcttccctttgtaagttccccaaataaatcaccccttaccaatgaactgggtttgtctccctcttttttggtttattgtctccttccacacttgggggttattttgcataaagtccttatatggaacacacgtgaacaaggagtaagtcttcattgctacaagccatgaaggaggttgggggggtgtttgttactgaagcataactacttatcctggctgatacaactgtcttcaaaggttttgaggaagctgaaatttgatattaaatacaagttattatcagagctttgcaagtcattaacctctctgtgcctcagtttcctcattgtacatggggcgataataagtacatggggcaataataagtaccctttttatcaggttatgagatttgaataggtagatagaagtaaagccattagaacagtatgtgacagatagaaaacaccatataagtgtttgctattattaaaaaacgcgttaggccaggcgcggtggctcatgcctataatcccagcactttgggaggccaaggcaggtggatcacttgaggtcaggagttcaaaaccagcctggccaatatggtgaaaccctgtgtctactaaaaatacaaaaaaattagccggacgtggtggctggggcttgtaatctcagctactcgggaggctgaggcaggagaatcacttgacccgggaggcagaggttgtggtgagccaagatagcaccactgcactccagcctgtgagactctgtctcaaaaaataaaaaacgtgttaatagttcccgccggtgacttatattttttccttatttatttattttttgagacggagtctcactctgttgccaggctggagtgcagtggcatgatctcgactcactgcaacctctgcctcccgggttcaagcgattttcctgcctcagcctcccaagtagctgagactacaggcgcccgccaccacacccagctaatttttgtatttttagtagagacggggtttcactgtgttggccaggatggtctcgatctcttgacctcgtgatccgcccgcctcggcctcccaaagtgctgggattacaggcgtgagccactgcacctggccccaactgtgacttgctatttgctcttccttctaccttttccccactactgctttcagaaaacacctacttttcttgcaagaacaagttcttacagcctctcctgcagtaaacgttctccgatttccaccgagctgagccggagctggcaattcgctctgtggggttcccacaggaacatcccagtatcttatagggttatgtgctaaccgctgtgttgtaattctttgtaactgtctgtctctctcgctccagtctcatcacactataatttatgtacgacttaattatctgtttattctgcacttctcccaggaaatttccatgaagttgaggaagtgtctggacctgcagcattaagacgttaaaacaaacaaaccctggccaggcgcggtggctcacgcctgtaatcccagcactttgcgaggctgaggctggcggatcacttgaggtcaggagttcgaaaccagcctggccaacatagtgaaaccccgtctctactaaaaattcaaaaattaagccgggcgcggtggcttacgcccgtaatcccagcactttgggaggccgaggcagacgcatcacaaggtcaggagatcaagaccatcctggctaatacagtgaaaacccgtctctactaaaagtacaaaaaattagctgggcgcggtggtgggcacctgtagtcccagctactcgggaggctgaggcaggagaatggcgtgaacctgggaggcggagcttgcagtgagaccagatagcgtcactgcaagtccggcctgggcaaaagagcaagactccgtctcaaaaaaaaaaaaaaaaaaaaaaaaaattagctgggcatggtggcgcacacctgtaatcccagctacttaggaggctgaggcaggagaatcgcttgaaaccgggaggcagcagtgagctgagatcatggcactgcactccaacctgggtggcagagcaggactctgtctcaaaaaaaaaaaaaaaaaagaaaagaaaaagaaagaaaatgtattcgaatctagtattcaggtgcacagagggtgaagaattgtagttcagatagagaagaaaacctgtaccttccacattgaccactgctcttcctctatttaaccatcctcgagggttgcactgagtcatgtcctttcggatgcatttccttcccagaggataagtggttgtcacttcaaacccttacaatatgctgtccatcctttttgaaggtccaagtcacttctaccttgaattaggataatgggtgtctacagatgagtgggatctggtcccagcctttgaggagcacccagtcaggtagagaaacagagttggacaccaactagggggagggtccccaggaaatggacagagacattgatggatttgtcaccaattttattaaatttattttcctttctccttacccccaaaccaccgtcctactgcagcaggagttttcggttttgtctgtatgtacaagccctggtcagagagaaaaagcctgtagattagaatgagaatttcaagcttttccagatcaagagacccataacttccctccccataactttcctacaatctttggcctgatttggctcatccagtgacgtcatgggcatctgggcagattttcagggttctctgccaaccggagttggtgaggagagaggagagaagagctgggaccaggggtgatggtcaaatgtgggaacagaaagagtccaaaaagacaagaggagacacaggcagaaatggagagagataaggtagagacagggtatagtggaagcaggtatagtgggttacagcgtgtcccccaccccaaagatatatccaagtcccaactcctaggacctgggaatgtgaccttaattggaaacacggtctttgcagatgtaattaagttaaggtgacatgagatttaggatgggccctacatctaaagacaggtgtccttagaagagaaaggagagggagatttgagatggacacacagaaaacaaaaccatgtgaagacagaggaagggattagaagggagctaaggaatgccagcagccaccagcagctaggacacaggcatggggtggattcactctcagaggctctggaaggaaccaactttgccaacctcttgatttcagacttctgctttcagaacccagagaatacatttcttttgctttaagtcacccaatttgtggtgatgttacagcagcaataggaaatgaatacacagggagacagagaaatgaggagagagagttggaagagaggctgagcaagttcacagtgagaggtagcctgcacggagcactccccatgcgctaagtgttattaacagcgttcactggccaggcgcggtgactcatgactgtaatcccagcactttgggaggatgaggcaggtggatcacctgaagtcaggagtttgagaccagcctggccaacatggcgaaaccccgtctctaatgaaaatataacaattagccaggcttggtggtgggcacctgtagtcccagctactcaggaggctgaggcagaagaatcgcttgaacctgagaggcagcggttgcagtgagccaaggtcgcaagatcgcgccattgcactccagcttgggccacagagcgagactccatctcaagaaaaaaaaaaaaaagagcgttcactgattcagttatcaccacccccgccagtgggaggtgatggcattactccctttttgcatatgaagaaactgaggcgttagggaaaggagattaattgggtacttggaggaggcagagagagagagagagaaattgagacggagaggggaagagaggggccggagaaggggctgggggggagggggagggcacaagcataaagaggcagcgagataagcttagagggggagaggaaggtgagggccacttcctccctaggcacagggcctggggtccatggaaatgttttcactgtagtatctttaaaagccagaagaagataaatgaatataacaacagtaattatgatgatgcatagaacataatgaagccaacttggatgatatttgtctttctaccaatgcatccaccaaatataacttttagcgtttttttttttttttttttttttttttttttttaatgtaagaagaggcccacaaaggcaaaagtgctgaggacccgggaaagttgtaatgtggcccagaggtggagaaaaaggaaaatgaggaagaaagacagaaataagatgagagaaaggtacggggcagggggcgggagggagaagagggaggagagagacagagagaaaaagagagacagagactaaagtgactgaagaggagactcccaaagtacacagtgacccatccaggggagtcgccatttttgaggggcccagtgggttccacgggggactgaggagggggcaaggatgactcacgagaccacgatgaccacgaagacaaagacagccagagacacagaaatgaggatgcccaacagcgcctggttcctcgggtatttgctgtccatctggtactgcagggccacgcggggttgccggtcgactggggcgggtggggaaacagccccgacctccacgtcaccacccctccttagccccatacccaccccacctgttcattcagcagcctggggcaggggtgggggtggggcgctctctcttcttctcttcctgcttgttccctgccctctcctggggtctgagtctccatttatccattcctctagtgctctgtctcaggcgccattgtaggcatttgggatatagccgggaaccaaactggcaaactggactcatggagttgacagtccaccccgcatatcacagttatcacagttacagtgaggagctagttctaaaagcatttcatttgatgggatggggtggggtgaggaggacttgggaagtttgactcaaaaccaaaagatacgatacaatggtcaggcatggtgagcttgcgcctataatcccagtactttgggaagctgaggcagggggatcacttcagcccaggagttcaagtcagcatgggctgtgagatcctatctctacaaaaaagaaaaaattagctaggtatggtggcacgagcctgtagtcctagcaactcaggaggctgaggtgggaggattgcttgagcacaggaggttgaggctgccgtgagccgtgactgtgccactgcaccccagcctgggggacggagcaagaccctgtctcagaaaacaaaacaaaacaaaaaccagagacaccatgcacatgagagggaggtgcaaaatgcgaacagtttcacaagatgaaagtcttagttgctgcatcttagctattggccctgaaggtggccttgggagttgctttctgcgtcttccacttgcctcccaccaccaactctttccttccatcagcaaagcctcttggcttgaccttcaaactgtaggcagaatccaatccacttccatggctaccaagcaggtccaaccccagcccactgcttctcttaggaggctcccttgacccctcctcccacagttcctcacatggcctccgggaggcgctgttaaaacctaagtcggctccctctgctcagtgtcttcctgctactccatggccccccatctcagaataaaagctcaagttctcaccatgctcttgcaagccctgcaccatctggttcccacgtgacccggccattgttctagccaccctactattctctttcattcactcggctctggccacactggccttctcctccttgttgcttaatcatgttggatctttgcatgtgctgttccctctgtcattgacactgttcccatcactcacttacttccttcagctttcaaaagtcacctctttagaggtgccctacatccgtattttctaaagtagcagcctcccccaggcactatctaccaaaccattctattttcattagaacaccattgccatctggatcaagcctgtttatttgttcatgcaattaccatctaacccagtggttctcaatctgggataattttgtcactcaagggacatttggaaatgtctggggacatttctgattgtcataatggggagggagatgctactggcatctggtggatcgaagctagggatgttgctaaacatcctacaatgaccaggacagcctccctaacaaagaatgatccagctccaaatctcaacagtgctgaggttgagaaaccctagtctaacctctggccccattaaaatgtgggctccatgagggcaggaactacatctgtctcccattccactgttcctcagtttgggacatcgtagggtgctcaaaatatttgttgtcaccaaataccagccaaaggaagcaaacaggcaaatccaaaagtgggacactctataggacacactcccttctttttcaatgccaatgtcatggagggaaaaaaaaaaacccaaaaactgataagagaaactgttctaggccgggtgcagtgactcatgcctgtaatcccagcactttgggaggctgaggtgggcgaatcatttgagcccaggagttcgagaccagcctggccaacatggcaagaatcagtctaaaaaaacaaaacaaaacaaaacaaaacaaaaactgttctagattttaaaaagaagagaaaaacctaacaattgaatgatataagaagtcctttcattgaacactggtttgaacaaatcaactgtgaaaaatattctggggacaattaaggaagttgacagtgggacctggaattatttgacattgaggaatcattgctaggtttggagggtgtgggaacgacattgtggctacttaggaaaatgtcattatttttagaggtacatgctatgtatggggcatggtgtctgtggtttcttttaagatactatggcaaagaataaagtaggtgaaataaatatggaagaatgttaattgttaacataatttgatagtaagtgctacttttgagattatgatcagagaggcctgtctgaggaagtgacctttgagacccaaatgaagtgaaggagtgattggaacagtgtgacagagagagggaacagcatgtgaaaagatccagcatgactattcaacccggatagatagatgtggattcattatacttttttttttttttttttgagatggagtctcgcattgtcacccaagctggagtgcaatggtgcgatcttggctcactgcagcctccacctcctatattcaagcgattctcctgccccagcctcctgagtagctgggattacaggtgcctgccaccacgctagggtagttttttgtatttttagtagagacggggtttcactatgttggccaggctggtctcaaactcctgaccttgtgatctgcctgcctcggactcccaaagtgctgggattacaggcgtgagccactgcatgttcggtctcgttgtactattctttctgctatgagaatacgttttttaggctgggcatggtggctcacgcctgtaatcccagcactttgggagccgagtggatcacctgaggtcaagagtttgagaccagcctggccaacatggtcaaaccccatctctactaaaaatacaaaacttatcagggtatggtggtgcacacttgtagtcccagctacttgggaggctgaggcaggagaatcacttgaacctgggaggcagaggttgcagtgagccaagatcctgccattgtactccagcctgggcgagaatccatataaaaaaaaaaaaaaaagaatgtatgttttttagatttatgaatgaatgaatgagtgaattcagcacatccttccaaattccccaggtatagcaatggctaagaataaaatctttttctagcacctgccattctggagctaggggcattctaaagttccagggagtctttccatttaacagatggaggaaagtgaatttcagaatacaggagcaacttctgggccacactctaagcaaatggttagggcaggattcgaggctgcatgtgggagcctcgaaacccatatctagtgggtcatggctgtcttcatctcttgcacgcctgtcccatgtcttcccccacccccagaagcttaccaaagcagtactttttgtggatacacttgggagtgatcctctggcaatgtaaacagtccaacacctcttcttttagcaagcctaggcaaggggaaagggagaagtaagacaagggcagatatcagaggaccggcaagggtggaaaggaagaaggagaaagaggagatggggtcccttggcttctcctaaatttcataggtcccactgcccagcagaggaactaagcaaaatgcactgacaattcacataaaaaataattgttatataatcattgaagaactaaattcatccagtagattcagcattctgcttgtggacatttaattaaacatttgttaattctgagtttgcacttttctttttctaatttggagcctcttttgcagacactggtgagatgtctcctctttgggcacactgcctcctcctctactggtgcatacaggagggctacatttcccagggtgcctttcagtaaactgtgaccatgtgacctagtcctggccaatggaaagtgagcaggatcatgtgtgtcccttccaggcttggctatacaactcagtgtgattgctattgcttttccttttgaagcatgcttagaagctgccatgtgtgtatagcctggatccctgagtcaccacctggactgccactcaactgtcaatgaaatttgggtgaaagaaaaataaacctttgttgtgttaaaccaccaagatgtgagggtttatttgttaatacaacatagcctattttattgtgacttacgtaccttcaaaatgttgttttgcagatagtcattattttcataaacctttaaaaagcaaatctccctaggtaccatggctttggggtaagggaactgccaaatggagtaaggagtggtagccaggcttgatttggggagacagggtgaagggggttaggagggtagagaagggagagatagacgatccagaactcacggcaaagtttggggttgcaggctgcaagagaaaattgctgaggtgagttaaattgggatggcaacttgataatttaattggaaagggatcaggagagcaggtaaggggtgaggctgggaaaggagagaagggaagattggggagagatgaagaaggctgagctataggggaggtgaagaaggagtttgggagaaaaagtggtaaaaggggatcaagaggtcaagggagaagaggagaggggattggtggagagatatgctgcaccttttaattcatatgaaattaaaactttcttgaattccttgatcacattcgccctgagggtcaccagctcttccagcagaggctcatctgaggagagaaagagatctctgtggggtgggaggcacccagaaagcccaccccactacctgaagcttccaggagaagagatgaggaagctcctcttcatttataaagggtaaccaagaccaggattactaagggtcccccaggcaaatctatggccagggagatcctgcatctatattctgattcaccgtggggcctaggcaaagccacccttccttggcctcactttcctcatctggcaagtggatttgatctctcttctcctcttcttttttttttctttttgagacggagtctcactctgttgcccaggctggagtgcagtggtgtgatctcggctcactgcaacctcggcctcccaagttcaagcgattctcctgcctcagcctcccaaatagctgggattacgggcacgtgccatcacacctggctaattttttgtatttttagtagagacagggtttcgccatgttggccaggctggtttcaaactcctgacctcaggtgatcctcccacctcggcctcccaaagtgctgggattacagacgtgagccaccgcacccgacctcttcttttttgtgtctacactcactccttcatgatttcaatccatatggctttatatattacctagacgtgcactgtccagtgtggtagccactagccacacatggctactgaacacttgaaataggctagtctgaattgagatgtgctgtaggtataaaatgtacactggattttaaagacattgtgcaaaaaacctgtaaaatatattgataattcctatgtggattgcatgctgaaatggtgatattttatatattgggttaactaaaatatattattaaaattaatttcacctgtttctatttacctttttaaaaatgtgactactagaattttttttttttttttcaaacggagttttgctcttgtcgcccaggctggagtgcaatggcgtgatctttgctcactgcaacctctgcctcctaggttcaagtgattctcctgcctcagcctgagtagctgggattacaggtgcccgccaccacacctggctaatttttgtatttttagtagagacggggttttaccatgttggccaggctagtcttgaattcctgacctcaggcgatccacctgtctcggcatcccaaagtgctgggattacaggcatgagccaccgtgcccggctgctactagaaaatttaaaattgcatatgtgactcctatttgtggctgacattctatttctattggatggtgctgttctatacacagatgccccccacgtttatattactagcccagagggctcactgaaggtgggatttatatacccaactatctggtcaagatatccaattggatgtctaagaggcatctcaaacccactaagtccaaaactgaaccctcgttattctcctccagacctactcccaacctcccagtctactccatcttagtaaatagatgtgtcatgattctaattgctcaattcaaaatccttggtgctttgacgcctttttcttttcctttttctttttttttttttttgagacgtagttttgctcttgttgcccaggctggagtgcaatggcgcaatctcagctcaccgcaacctccgcctcctgggttcaagcaattctcctgcctcagcctcctgagtagctgggattacaggagtgccaccatagctggctaattttgtatttttagtagagacagggtttctccatgttggtcaggctggtcttgaactcccaacctcaggtgacccaccgtcctcagcctcccaaagtgctgggattacaggcgtgagccactgtgcccggctgacgcctttcttttttttatatccctgtgcaattcgtcagcatgactggcaacaaatcctgtttgttcaatattcaaaatacccattccctccccttaactctaagatctcatcttccatagagacaatgtcgccgtctcactccactctggccttcttggatgttctgtgactatgccaaacatagtcccatctcagggattccaccagctgttctttctgcctgcacccttctacccctagaccccctcatggctgcttccctctccccttcaggtcttttctcacatgctcctttttaagggacatcttttttggatgccctactttaagctgcaatccccacccctactcacagcacttgctattccgtggtccctgctttatttttttcctccttagcatctccctccatttgacatattttatcgggcaataaaggattaactgagcaggcctgggttgtcccaatcctgcacatcccccgctcccccccaaaaaaatttggctcttgcctggctcacagaaggtaacctctatttccttggaatatcctgcctgttaagagtatcttggtttggccaggcatggtggcttacgcctataatcccagcactttgggaggcctaggcgggcagatcacttgaggtcagaagtttgagaacagcctggccaacatggtgaaacctcgtctctactaaaaatacaaaaattagccgggcatggtggtgggtgcctgtaatcccagctactcgggaggctgaggcaggaaaatcgcttgaacccggcaggcggaagctccagtgagcagagattgtggcactgcactcgagcctgggtgacagggcgagaccgtctcaaaaaataaaaataaataaataaataaaagagtatcttggtttatgaccaggtgcagtggctcacacctgtaatcccagcactttgggaggctgagacacaaggatttattgaggccagaagtttgagaccagcctgggcaatataatgagacccagtctctacaaaaaattaaaaagtagaaaattagccaggtgtggtggcacatgcctgtggtcccagctacttgggaggctgaggcggcaggatcgctggagccctggaggtcgaggctgcagtgagctgtgatggcgctactgcactccagccggagcgacagtgaggctctgtctcttaaaaaagaaaaaaaaaaggctacattgcatgcgtgtttgctcttatttttatattcaagggaggtggggcagaccggcggaaagaagaggggtgctggagaaggcgttccctcgtctctcctacctttcagagagttacccattaagtgctgcgtttggttcttgacaaaggacgccacaaggtccagttgatttgtctctggggggagaagggagaggacactccagtgagccccccagagagccaagtgacctcaccccctccaggcctggccccgacccctcttgggggcgtggtctccggcatccctcgcccagccccgctgcccaatttctcccaacacgcacccactttccccacaaacacgttcagcgcgtagtcccggaagaaaggcccctccatgcccatcagcacggccccggcgcgcgcctgcagctgctccaactggaagcgactggggatgagggcggagcgcaggtgacccagggcctccagcaccaaggggtcgcactgcaggcagccccagcctccgggggcgcccaagcccgagagcagcagaagggtcaaagccagaggcatggcggggcctttgtgacgtcacagagagaacccggcccgccccgcctcccaggcgagggcgcggtcaggaggcccagggagcatcacggtgttacaggcacgtgttcgctgagcacctgctatgtgccaggcatggttctagaacctagagagaaagtcaagaaaaacagaaagcctctgctcaacccctcttggaacttactaattcctcttaaatttattcattcaacacatattgttttattttatttatttatttattttttcccgagatggagtctcaactctgtcacccaggctggcgtgcagtggtgtgatctcggttaactgcaacctccgcctcccgggttcaagtgattctcctgcctcagcctcccaagtagctgggactacaggcgtgcgccaccacgtccggctaattttttatttttagtagagacggggtttcatcatgttggccaggctggtctcaaactcctgacctcaggtgatctgcccgcctcggcctcccaaagtgctgggattataggtgtgagtcaccacgcccggcccacatattgttttttttttttttttttttttttttttttgagacagagtcttgctctgtcacccaggctggagtgcagtgaggcgatcccgggtcacggcaagctctacctcccaggttcaacctatttttgtgcctcagccaaccgagtagctggggttaccatgccaccacacccagataatttatatatatatatatatatatatatatatatatatatatatagagagagagagagagagagagagagagagagagagagagagagagagagatggagtctcactctgtgtcacaggctggagctcagtggtgcgatctcagctcactgcaatctttgcctcccaggttcaagagattctcctacctcagcctcctgtgtagctgggattacaggcacgcaccaccacacccagctgatttgtgtatttttagtagaaacgggttttcaccctgttgttcaggctggtctggaactcctgacctcaagtaattcacccgcctcagcctcccaaagtgctgggattacaggccactgcgttcaaccttacatgcaacacatatttatttattgaacacctactatgtgccaggtgctgttcaaggcccccagagctagagctgagaaaaacaagaggttcttgtgcttgcagtacttaaattaattaactcaacaaatatttattgagcacctactatgtgccaggctccagagatagactgacataagacgaacacaatctctgctcatagagttcaggctagcagggatgggagggagtggcaggaagagaaacgtaaaacctggtacacagatgagtaactgaaatactgacaaactgcattacctgctgggaagcaaatacacagtgtgatacagttaagagagttccctgaggccaggaggtagggtctggttccctgctgttgtccagcgcctagcgtgtactagttgttcaacagatatttagcaaatcaatgaatccacaagggagggtatactgagggaagggcactttgtttttccctgcaattttcatcttgaaagttttaaaatctggagaacagttgcaaggatgacccaataaacactcagatatgacttcacattttgcattcgctgtatctctctatatatgtagatgaatttaatatcaattaaatcatagaaattcaactaaaagacattataatagtatacacagagatatagcaaatgtcaaaataatatgatatattaatatatagttaaatattaattcagagagattaaattaattaagactaaatattactacgttgagggagagaggaggagagagaggcagagtaggagagggcagttgtcttattaatagtttaggttctacaacaaaactccatagactgggtggcttataaacaacagaatttatttcttccagctctggaggctggaaatccaagagcagagcaccagcaaggtcaggttctggtggagctctcttcttgtatcctcacatggcaaaaagagggtgagaggactctttgggttcccttttttattttttaatttttgagatggggtcttgctcttgtcacccaggctggagtgcagtggcacgatctcagctcactgcaacctccacttcccaggttcaagcgattctcctgcttcagcctcctgagtagctgggactacaggcgtgtgccaccacgcccggctaatttctgaatttttagtagagatggggttttgccatgttggccaggctggtctcaaactcccgacctcaagtgatccgcaacccccctcggcctcaaaaagtgctgggattacaaagtgtgagatcaggccacaaggaggtgctcacacccaagtgaaattctctctgctcccggactgagagtcaggccttgccacccacgcctacctttcttaggatcacccagttgtctacctaatgccgtgctggccataatttgagaaatcaacctgagatattaacgtgtgcgtccttttcctcatcccctattaccatctgcctttcaggcagggagtcaaggggctgttgtttgactgaagaaggggtggccagaatgggatgggaaggccactcattcctcagcttcaagccccaaaccctcaggcctgggtgtgaggcaggaaggcttgggatgcagaaccggttttgtttatcgggttcagccatgctaatttggtaaaacataagttagatgaactatcatcagatttcacaccccagcaaaagtggctgaggaagttcccacactcgctctccaggcgcacagacgtccatcactgtgttgttgacggcactgggaggcaaaggcaagctgggtgtcctcactggggaggtgggtcgcctgtggtacaggaccctgcaagcagctagaagaacagatgagcctgtccacaccatgccatgaatggatccaagtgaaaacagcaaagagcaaaacaaagcaagcaaacaaacaaaaaacccacagtgaaacctacaactcaataccattgacataatttttttttttttttttttttctggagtcaaggttctccctctgtcgctcaagctggagtgcagtggcacgatctcggctcattgcagcctcaacctcctgggctcaagtgatcgtcctgcctcaggctcccacacagaatagaaaaaaaatacccgggtatggtggcatgcgcctgtagtcctagctacttgggagacttaagtgggaggatcgcctaaacctgggaaatcgaggctgaagcgagccatgatctcgcgactgcactccagcctggggcagagagcaagaccctgtttcaagaaataaaaaggaaaagaaaaggatgatatgtttgttcgtttgtttattttgagacagagtttttctctgtcgcccaggctggagtgcagtggcacgatctcgactcactgtaatctctgcctcctgggttcaagcgattctcctgcttcagcctcccgagtagctggcactacaggtgtgcacaaccacaccggctaacttttgtattttttttttttttgagaccgagtctcactctgtcacccaggctgcagtgcaacgacatggtctcagctcactgcaacctctgcctcccgggttcaagcgattctcttgcctcagcgtcctgagtagctgggactacaagcgcgcgccaccacacacagctaatttttgtatttttagtggagatggggtttaactgtgttggccaggctgttcttgaactcctgacctcgtgatccacccaccccggcctcccaaagtgctgggattacaggcgtgagccactgcgccaggccaattcttgtatttttagtagaggcggggtttcaccatgttggccaggctgttctcaaactcctggcttcaagtgatctgccaccttgcctcccaaagtgctgggattacagtcgtgagccaccacgcccagctgaaaaggactatatgttttatgctcatctgagtttgtgactgttcaaagctgtgcctgctgctctcatatttccagagggtttggggggctttgtgaatctcatgaagtaatgtacatacccatgtgtgtattgccagaatgaaggcatgccttatctcatttcgtccacacgaaatttggctgatgtggatgcggaggcagagcagggacagtctactcgtgtgaggtcacgcaggtagagacagagacagatgtggggccaggcaggcagccagaggtccccaggctgcaaagccctgctgagtgacactaatggcctgatgtggcgatggtgtgcagcaggcggaaaagaatgtctgggaaatggttacagggatttggcttcaagcctagcggaggcggggaattagaggaggtggttccagcgtagcggggtggggtgaggggcgttttctcatcatccacttcccatgtccagccccctccctagtacacattgtgtggctacaaaaacggtgacctgttctcatgcacagctgtgggagggcagacagggacagccacgttggaaaaccgtcaggctctatgcaggctggccacgtgcgcatcccttcctccacatgcacacacgggaaatgggtgcacacacccgccaggggcacgcagacacgaatccccttggcagcgtcctttgtaaggaactcaaggtggagacggcccaaatatccgtcaacgggaagactcgctagataaacccactgtggcgtgttcctcggatggaatcccgcacggcagtgggatgatgatctagctgcccgcaaacctctctgggccatcgttcaaacatgatgttgagcaaaagcagaaacaaaggacgacgtgatctgcaattccttttttatttttattttttgacagagtctcgcgctgtcccccaggctggagtgtagtggtgcgatctccgctcactgcaagtgatccgcctcccgggttcaagcgattcttccgcctcagcctccccagtagctgggactacaggcgcccgccaccacgcccggctaattttttgcatttttagtagagacggagtttcactgtgttagccaggatggtctcgatctcctgacctcgtgatctgcttgcctcggcctcccaaagtgctgggattacaggcgtgagccaccgtgcccggccaatctgcaattccgttgatggaaagttcagaacaggcaaaggcacgggatggagccacagctgcacgctcatctgacctgcggtccctgtaaggacagtgatgatgggaaagtgaggagagaggttttctctgcagggacaagggggctccaactgggccaccttctgaggggcctcactgcaacctctgcctcccaggttcaagtgattctcctgcctcagcctcctgagtagctgggactacaggcatgtgccaccacacctggctaatttttgtatttttagtagagacgaggttttaccatgttggccagcatggtctcgatctcttgatctgatgatacgcctgcctcggcctcccaaagtgttgggattacaggcgtgagtcaccacgcctggcctacagcctccttttttaaggctgaataatattccattgtatggatgggccacattgcgtgcattcattcatcagtcgatagatacgtcagttgcttgcacattgtgttctgcattcttttctggatgtgtgttatatttcacacacacaaaaactttaaaataacatgctttgttatttgcatggcctgggattgaatggcaggcaccccaaggcagaggcggggcccgtgacctgccccgtggggcacttctcacctagttcagtgactctcacacccacgggtggggcacggtcacacccacagttcctctcattccatcaccagcactgaggggtgacatgggctctgctcacacactgggcctggaggctgcccctcaggccagagtccccacaccctcccgaggcccaggggttctctgtacactgcctgtctccactgcctgctctctggacaggaaactggggtgtgaggtgaccacaggctgtctgcccccagccaatcctaactgtccctcttgttcctcaaactctatcactcgctcctttttctcttatgcctccctttctgcctctttctctctctctctaggtctctgtctcctccctgggtctctgtctctctctctctctctctctctctctgggtctctgtactcccctgtctctgggtctctgtcccctcccccttctgggtctctgttcctctctctctctctgagtctctgtccccctctctttgggtctctgtaccaactctctctgggtctctgtaccacctctctctgggtctctgccctcacagtctctctgggtctcttttttttcctctctctctctctctgtccctctttctctgggtctctgtccctatctctctgggtgtttgtccccttcctctctgagtctctatcccctttctctgggtctctgtccccccaaccctctgggtctctgtccctctctgtctgggtctctgtccccccctctctctctgggtctctatccctctctctctgagtctctgtccccctctctctggttctctgtccccctctctctctctgggtctctatccctctctctctgagtctctgtccccctctctctggttctctgtccccctctctctgggtctctatcccctgtctcctatctctgcccctctccctgtgtctcagtgctttgtctcctttttcctgtcttgctcctccctccctccctccctctgtctgtccctccctccctcccttcatttcttccttccttccctccctccctctctccctcccttctttccctccctccctcccttctctcctcccttccttcctttcctcttgcctgcctgcctttcagactctgtttgagaaccccatgttctgtgtgacattgggcaggaggcttcctctctttgtccctcagtttcctcactgcaccatggcactcactgggctgacctgaaactgaagggaatcactgtgtgtcctggacacctggtattagtggacgctgaaccaaacccacggcccacatgggttgagagtgtggactctgtgccaggccacatgccaaggcctagcgcctcctttcatcctcacggtgtgctgtaagggaagcaatggcattgtccccatctacagatgaggatgatgaggttgtacaacttgccccaaatcggacagtgagtaggaggcagggcgagaacttgaactcgggctgcccggcctcagagcctgtgctctaaccctacgctgtgagggtttcatattggctgttacgtgtatcggtaatcgggatttcccaacgtcagcgctactgacgtttggggctggatgatccgtccttgtaggccccgacctgtgcacggtataggatgtgggcagcatctctggcctttactcactaaatgccagcagcacccgcactcccagctgtgacaaccatagatgtccgtagataatgccaaaagtcccccacctgtgaatcactgtattcaacacagtgtgcaggatcaagaatacacggtactggccgggcgcgtggctcacgcctgtaatcccagcactttgggaggctgaggcgggcggatcacgaggtcaggagatcgagaccatcctggctaacaaggtgaaactccgtctctactaaaaatacaaaaaaaaaaaaaaaaaaatagccgtgtgtggtggcgggcgcgtgtagtcccagctactcgggaggctgaggcaggagaatggtgtaaacccgggatcgcgccacagtactccagccagggggacagagcaagactccatctcaaaaaaaaacaacaaaaaacaaacaaacaaaaaatacataggccagcgaggactcaaccaaaataaaaaaatctgaagtcctttgggcttcagaaaacaccatccagaaagtgaatggacagcaatataatataaaaatatatttacaaccgggtgctcatgcctgtaatcccagcactttaggaggccgaggtgggtggatcatttgaggtcaggagttcaggaacagcctggccaacatggcaaaaccctgtctctactaaaaatacaaaaattagctgggtgtggtggtgcgtgcctgtcatctcggctacttgggaggctgaggcaggagaattgcttgaacccaggaggcggaggttgcagtgagctgagattgcaccattgcactccagcctgggcgagaaagcaagactctgtctcaaaaaaaagaaaaattaaaaaaaaaaaagaaaatgctctggaattagatagtggtgatagttgtgcaaacatgaatatactaaaacccaccgaattgcacgttaaaatggtgaattttatggcatgtgaattatatttttaaaaaagtttaaaaggtagtttttttttttaaagagtgtgggctgtagtgtcaggatcccagctttgccccttatgaactgtgtgacctgtgcatatccccccgtacctcagcgtccttgtctgtaaaatgaagacaacattagcatctctacaatagtttcgctgtgaggggcaaatgggatgatgaatttaaaatccttgtacacagacatcgttctgtaaatgtgagctgggagcacagaggtatggcctgtgagtcacctgaaaattctgtttggtgagaactcagctcacatcctctctcccactagcccctggccccaacctgcctccagtccacctcccagccaggaaagttttatactgtatgcatgcactactttggaccaaaatctagggcctttctttctttttttttttcttttctttctttctttttctttggagacagtctggctctgtcgcccaggctggagtgcagtggcatgatctcggctcactggaatctctgtctcccaggttcaagcgattctcctgcctcagcctcccaagtagctgggactataggcatgtggcaccatgcccggctaattttctgtatttttagtagaaatggggttttaccacattgaccaggctggtctcgaactcctgacctcaggtgatccacccgccttggccttctaaagtgctgggattacaggtgtgagccactgaggccggcctctagagctttaatttttatttttagagatggggtctcactatgttgcccaggctggtcttgaactcatggcctcaggcgatcctcccacctcggcctcccaaagtgctaggattacaggttcgagccactgtgcctggccagggcttattttatgccacaacactgcataggaaagaaaaatcttaaagattgtaaggcatcatgcaatcatgaaaagctaattattttctgtacctccaagaccaaaggttttaatctcaacctaaaaaaaccccagtcatggaacatgcattaaatatttgacataatgagtgcctagatgtgcttttgagttgtagagctatttggctattaaaagtacattcagcctggtggctcctgcctgtaatcccagccctttgggaggctgaggtgggcagaccttgaatctaggagtttgagacaagcctgggcaacacagggagaccctgtttctaccaaaaaaaaagaaaaagaaaaaaaaaaagctggatgtggtggctcacagctgtgttcccagctacttgggatgctgaggtgggagaatcccttgggcctgggaggtcaaggctgcagtgagccatgatcacaccactgcactccagcctgggtgactgggtgagatcctatctcaaaaagcaagaaaagagaaaaggaaaaaagggaggaaggaaggaaagaaggaaagaaggaaggaagtgagggagggagggagggagggagggagagggagggagggaggggaaataatccagcctcaggggcatttccaaggaaaatgctgtcctggtcacaggacactgctccacccatggctgaggcaattgtccctccctcacagatcttatcagactgcaggatggtatcggtttctctttcccttgaggactcagccctccccacctcagacagcgaccgctctaggccggaaccttatctgagctccctaggcctccagaacccacccgtttctagccacacggtagacatgcctgtttcatgcgcacactcattcatagacacagcacatgcaccacctctatgccaggcacagttctagacacgggggctacaccagtgaccagctcagactcaaacccctggagctatgttctaataaaataagcacatgaaatatatagtatatttcatggtcttcggcactaaggggaaataaataaagcagatagggagggtgggaggaggtggcaggaggtgctgttaatttccagggttctgcagaggagaggagacctcaccaagaaggtgatattcaggtaaagtccggaaggaaatgaggagcaaatcacaaggtcatcccagggaagagccttctgggcagaggaaacagcaaatgcaaaggccctggggtgagaacgtgcctggcctttttttttttttttttttttttctgagacagagtctcactctgtcgcccaggctagagggcaatggtgcaatcttggcttactgcaacctgcgcctcctggattcaggcgattctcctgcctcagcctcccaagtagctggaattacaggcatggccaccatacccgactaatttttgtatttttagtagagacggggttttgccatgttggctaggctggtctcgaactgctgacctcaggtgatccacccaccttggcctcccaaagtgctgggattacaggtggaaggatcgcttaagcccaggagttcaagaccagcctgggccacatagagagatcccatcttcacaaaaaatacaaaaattagccaggggtggtgcatgcctatagtcccacttacttgggaggctgaagtgggaggattgcttgaggctgaaagttcgagtgtagcacctgttctgtgcatacactttgtgtccttctgccacaggacctttgcacatgctgactcttctgcctggaccaccttactctcccattctacctaataacccctactcatctttcaacttaaagctcaatgaggacaccttctaagggaacaccttgggatggtcctgacaaggtcaaattcctctgttagatgttctcagaacactatgcatttttccatggtagccctcagcagggaggggagtttacatttttgggtgtgactgcctgattaatgatggtcttccccacctgaacgtaagctccacgtggacatgaacttgctccctgctgtgtccccagcccctcgaacaatacctggtacacagtaggggctcaataaatatttgtcagatgaatgagtgaatgtatgaatgagaaaaataacaagaatgcaggctaacaactaatgagctcagacaggaagggataaatacaagccacgttgcaaaggaagaatgggtgagagatggatttggagagagaataataatgacctggctggggccggctgtggtggcttacgcctgtaatctcagcactttgggaggccaaggcggtggatcacgaggtcaggagatcgagaccatcctgactaacatggtgaaaccctgtctctaccaaaaacacaaaaaattagccaagcgttgtggcgggcgcatgtagtcccagctacttgggaggctgaggcaggagaatggcgtgaacccgggaggcggagcttgcagtgagccgagatggcgccattgcactccagccggggtgacagagcaagactccatctcaaagaaaaaaaaaaaagactaaactaagctgtgcctgtgtgcaaggaatgtgcatgactggcaagaaatgtgccttgtcagtcccaagatggagcagaactgaaaatggggttattctggctctcctgggctcctgtttccttaatgcttctggtccacggatcacatctcaggagtaaggctccagggctgggtttctcagccggcgctgttgacatttggggccatacaattctttgttgctgggggctgtgctgtgtgttgaaggatgttgagcagcatctttggactccacttttgtttttttttgttgttgttgttgtttttgagacaagagtcttgctctgtcgcccaggctggagtgcagtggcctgatctcagcttactgtaacctccatctcctgggttcaagagattctcatgcttcagcctccccagtagctaggattacaggcatgcaccaccaaacccggctaattttttttgtatttttagtagagacggggtttcaccatgttacccaggctgatctccatctcctgacctcaggtaatccgcccacctcggcctcccagagtgctgggattacaggtgttaaccaacgcatccagtcttggccattttagatgtcaggggacctccccaccagccaggaaaatcaatcaaaactgtctccagacattgcaacgtcccctgagggacactatttctcctgtttgagaatcactgatctgatatgatcatacctatagcagtcagaatgaaatgtgttgtgttgtgttgcaggaataaaccaaccccaaatctcagagacatgaaacagcagagatatgcttcttactcatgctaatgcccatcacagccagctgaggactctacctccacagcttcagagttctgactatcgaacccaggctaacaaatcagccactcgtgggacattgcttccagttactaaggctgagaagccaacgtgcctaaatcctccagtgccaatgaaatgacacgtattcctggtctcatttcattggctcaagcaagtcacatgacaggaagtacaatcttatatgctcagaggagcaaacaacaaaatatctgtgaacggtctattgcaatgtaccaacatttgcatataagtattcacactatctgccggacgcgttggctcacgcctataatcccaacactttgggaggacgaggcaggtggaccatttgaggccaggagtttgaaaccagcttggccaacatggtgaaactccatctcttctaaaaatagaaaaaaaaacttagccgggtgtggtgcagacgcccgtaaccccagctactcgggaggctgaggcaggagaatcgcttgaacttgggagacggaggttgcagtgagccgagatcgtgccattgcagtccagcctgggcgacaagagtgaaactctgtctcaaagaaaaaaaaaaaaaagaattcatattatcttattaaagttattttaccttatttctcctttatcttacggttatttgatttttttttctttttgagacggaatcttgctgtgtcacccaggttggagtgtagtggcatgatctcggctcactgcaacctccggctcccgggttcaagcaattctcctgcctcagcctcccgagtagctgggactacaggcgcctgccaccacgcccagctaatttttttttcttttttttcagtagagatggggtttcacgtgttagccaggatggtctcgatctctgacctcacgatctgcccgcctcggcctcccaaattgctggaattacaggcttgagccactgcgcccagcctatttctcctttatcttaaagttatttgattttttaaagttatgtgtgtaaatagtttagattacccatggactttattccagcagagtacagaggaaaaacaggacatttgtaataaaagggggaccttggcatacccaaccatgatgcacatgtatgttcaccaaaatccacgtactaaaacacggattggctaactacaggggctaaattcagtctacagcccgttcttttatgagccagagctaagaatggtttttgtttttaaagggttgtaggctgggcacggtggctcacgcctctaatcccagcactttgggaggccgaggcaggcggatcacgaggtcaggagttcgagaccagtgcggccaacatgatgaaaccccgtctctactaaaaataggaaaattagcagggcatggtggcgggcacctgtaatcccagctactcgggaggctgaggcagaattgcttgaaaccagaaggcagaggttgcagtgagccgagatcgcgccactgcactccagcctgggcaaaagagcgaaactccgtctcaaaaaaaaaaaaaaaaaaaaaaaaaaagggttgtttaaaaaaaaaaaaaaagaatatgtgacaaagtttttttgtttttgagacggagtcttgctctgtcgcccaggctggagtgcagtggcatgatctcggctcactgcaatctccacctcctgggttcacgccattctcccgcctcagcctccccagcagctgggactacaggcgcccaccaccatgcccggctaatattttgtatttttagtagagacggggtttcaccgtgttagcaatctcctgaccttgtgatccgcctgcctcggcctcccaaagtgctgggattacaggcttgagccaccgtgcccggcctgtgacaaagatcttatatgattccctaagtttaaaatatttcctctctgggccgggcatggtggctcacacctgtaatctcagcactttgggaggccgaggtgggtggatcacctgaggtcaggagttcgagaccagcctggccaacatggtgatacctcgtctctaccaaaaatgcaaaaattagcccagtgtggtggcgcacccctgtaatcccagctactcaggaggctgatgtgggagaattgcttgaatccgggaggtggagggtgcagtgagccgagatcgcgcgactgcactccagactgagtgacagagagagaccccgcctcaaaataaaataaaaaataaaataaaataaaatatttcctctctggctctttgtagagaaagtttcacaactccataaaagactgcccttagaaaccctattgtaataaccccaaactggaaactacacaaacatccatccgtccaccattgaatggataaatagattgtgttatatttgtacaatggaatgccatctagtaggggttgacaaactttttctgttaaggaccagatagtaaatattttcagttttctgggccatgtggtctctgctgcagccattgccaggcttacacagctatagaccacagtgaatgaatgggcgtggctttgttccaataaaactttatttacacaaacaggcaacagtctagagctgactccaggttgtaggtttccagcctgtgccattcagcaatgagagtcaacaatcaacatacaacctatgttaaatggaggaagacagactcaaaggagtacagactgtactgttccatttctataaagttcaagaacaggaagaagtaatctatggtgttagaagtcagaatagtggtgacccttgggagaagaagagggacaagagggcttggggatgttctgattttaaaatctgggtgctggcttcctgggcttgttcactttgtgataatttgttgagctgtacattcacaatgtttgcaccatttttgtgtgcatttattctaaataaagctgggcaagggtgctgcctgtgacagtctgatacctggcacagcagctgcacagcggaaacccccagcttctcaccggaattgggatctgacagcttctcagcctcacagctgttggagcttctcagatccactgatttagtgaatttgacacggcggaaaaattctcaggttcttacaagaaccacgcctcagtgactctcctctttcttaatctcaccactttcaaaccaggaaatgagcagagagaaaaaaaaaacaaaaaccaacaataaacccatttaaatacctctgagacaccaagggaaatgtcctaaacgccaggtaatgaagtccatgttctttactcctgggaaagcgttgctaattcatctccttcatgctgtgactcacgcatctctggtgaagagaggcctccccagaccacctgatctaagggagcagcccctcaccccagcgtttcctggcagtcttctctgctttctgttttgccttcatgagtgtaagaaactgaattttgtctcctcctaaaaaagaattgttgacatcctaacccccaatacctcagaatgtgaccatatttagaaacagggtcattgctgatgtaattagtcaagatgaggtcatcctggagcagagtgaacctctaaaccaatttgactggtgtccttataaaaataatgccatgtgggctgggtgcggtgcctcatgcatgtaatcccacactttaggaggccaaggtgggcagatcacctgaggtcaggagttcgacaccagcctggacaacacggtgaaagcccgtctctactaaaaatacaaaaattagccaggtgtggtggcacacacctgtagtcccatctactcgggaggctgaggctaggacagaggactgggacagattctccctcgtggacttcagcaggaaccagctcaggcaacactgcaaatttctggcctctggaattgtgagacaataaatttctaccatttaagccacacagtttctggtgcttggttacggctaatacagatggataaaattcagatatgggggaaggggaggatgggcattcaaggtgaagggaacagcctgggcaaaggttaggaaccaggacaccactaggcttccacagagaaggatgcgaagtttagtgtcatggggttgtggtgtgcattactataggatgctgcatctcagggacacttgacccatgctcactgtccccttctcagttccagacgtgtgtctctgacagggtctggccaggcaatcgaaaatcaccttaggtctttcaacaggaggtaatttaatagaggggattgatcacacagagcatgaaaggactaaagagttatatgctgcacagggaggcattctagagagtctgtacgtagagtacggctatctgtctatctatctttttaaatttttatttttgagacagagtttcactcttgtcgcccaggctggagtgcagtggcactgtctcagctcactgcaacctccgcctcccgggttcaagcgattctcctgcttcagcctcctgagtagctgggattacaggtgcccaccaccatgcctggctaatttttgtgtttttagtagagacagggttttgacatgttggccaggctggccttgaactcctgaccttaggtgatctccccgccttggcctcccaaagtggtgggattacaggcgtaagccactgtgccagcctatctatctatccgtcggtctgtctgtctatctatctatctaccttttcagagacaaggtctcactctgtcacccaggctggagtgcagtggctcaatcacagttcactgcagcctcaaactcctgggcccaagtgattctcccacttcagcctcctgagtagctggactacaggtgcatgtcactacacctggttaattttaatttttttaaaatagagatgagggtcttgctatgttgcccaggccggtcttgaactcctggcctcaagcaattctcctgcgttggcctcccaaagtgctgggattacaggcacgagccaccgtgcaatctatacaatctggattttaccaagtcctagaggtggtttcagctttgctcaagtttaagcagctccagctttgctgcttaaaatgtggtccatgaagtagcagcatcagcatcacctggagtttatattaaaaatacagaacctccaccccaccctggacctgctgaatcagaattttaagatccctcacaacattaactgcgggagggatgctgtgtccttgatgcatgacatcaagaggtctctgatgtcagcaggtcccacaacgggtgatactaactttgatcccatgcttaagatgctgtctacccagtttctcctctgtaaagttactctttctcacacagagctcatttgatggcttttaccaacgcacatttttagagcatatgaaactgtgagaatccctgatctagagagtattgctcaataaccataggtgtaatgacccatgtttgtaataacagccctgagtcaaggaaagagctgattaattacggcatctgtgggaggtaatttagcttaatgggtaagagttcagacttggaggcaccaaattagggacgcaggtagccaaagcgcagaggtttaaaacttctaccttcactgtacttttgtttcctattctcagtattcagctccttactatgttctctctatccccctgttgccttgttttgttgtattttttttgaaacagggtctctctctgtcacccaggctgcagtgcagtggcgcgatcttggctcactgcaacctctgcctcctgggttcaagtgattctcctgtctcagcctcccaaatagttgggattacgggcatgtgccaccacacctggctaatttttgtagttttgtagtagagatggggtttcactatgttggccaggctggtctcgaactcctgacctcaggtgatccaccctccagggtctttctctgttgcccacgctgcagtgcagtggtgcaatcatagctcactgcagccttgaactcctgggctcatgcgatcctcctgcctcagcctccagagtagttgggactacaggcatgtgctaccatgcccggctaactttttgattctcggtagagacaggagtagaggctggcctcgaactcctgacctcaaatgatccgcccgccttagccacccaaagtgctgggattacaggcatgagccattacgctcagccttgttcagcatttttaaaagcttcactgcctgcccagcgtgatggctcacacctgtaatcccagcactttgggaggccgagtggggcagatcatgaggtcagcgatttgagaccagcctgaccaacatggtgaaaccccgtctctactaaaaatacaaaaaccagccaagtgtggtggcaggcacctgtagtcccagctacttgggaagctgaggcaggagaatcgcttgaacccggggtgggggggcagaggttgcagtgagctgagatcgtgccactgcactctagcctggtgacagagcgagacaccatctaaaaaataaaaataaataaaaataaaataaataaataaataaataaaagcttcaccgcctgacattatgtcaaacattttattgtttacttgttcattgtctcttccatgagaagttgagatccaggaggacagacactctggcttgtctatgggggtattctcagttcacagcacagtgcccagcatacggtaggtgcttaaaaaattgtgttgaatttttaaaaatgtgagcactggaatcagactcacatgagttcaaatcccagctctgccccttacttatctgtctctaagtctgtttctgtgttggtgaaattgagataatggtgctgaaagggttaaagaaatatgatgcatgtgaaggttttgccatatatggcttttgaaaacctttttattttgaaataatttcagacttaacaaaaaagttgcaaaaataatgcaaagaattctcatacaaaataatgcaaagaattctcactcttcacccaagcttctccaaaggttgaaacttttcataaccacagtaaaatattatgaaataaacatggtaacatttctgtggactaatctacgaaccctttccctccctccctccctccctccctcccttccttctttccttccttccttccttccttcctcctccttcccctccttccctccctccttcccttctttctctctctctttctctttctttccctcccctcccttcccctcccctcccctcccttcccttccttccttccttccttctttccttccttccatccttccttccttccttccttccgacagagtctcactgtgttgcccaggctggagtgtggtggcacagtcacagccactgcaggcttgacctcccaggctcaagcaatccttgagccaagacctgggtcacctactgatttctttttgttacaggcgtgtgccaccatgtctggcaattttttttttttaattttgtagagataggggtctctcggctgggcgtggtggctcgtgcctgtaatcccagcactttgggaagccgaggcaggcagatcacctgaggtcaggagttcgagaccagccttgccaacatggtgaaaccctgtctctactaaaaatacaaaaattagccgggcgtggtggcacgtgcctgtaatccctgctactccggaggctgaggcaggagaatcgcttgaacccaggaagcggagtttgctgtgagccaagatcatgccactgcactccagcctgggcgacagaaaaagactccgtctcaaaaatacaaaaattagccgggcgtggtggtgggcgcctgtaatcccagctacttgggaggctgaggcaggagaatcgcttgaacccgggaggtggaggttgcggtgagccgagactgtgccactgcactccagcttgggcaacaagagcaaaacctcgtctcaaaaaaaaaataataataataaataaaaataaagagagaaatgactgattcatataacaacatggatgaatatcaaaagctttacgtggagtgaaagaaacacaaaagatcatctactataggattctatttataaaaagctctagaacagacaaaactaatctgtggtgataaaaagcagaacattagttgcctgggggtgggtggaggtgcgagttggctggggagagtgtcaggtaactttctaggacatggaaatgttctatttttttctagttgggtgtatacgtttgtcaaaactcattgaatggtatacttagcaattgtacatttaactgtctgtaaattttacctaaataaaaggaaccctaaacaaatattgaaattgaattaatgatgtgtgcaatgaagtgtttatggctgaagcctactgacgtctgcagattattctaatgaatggataagctgcagtttctcaactccagcactattgacatttgaggccagagaattatttgttgtgggaggctgtcctgtgcattgtaggatgtggttgacatcctggcctctacccactaaatgccagcagcactcccacacacacaggttgacagtaataaatgtttccagacattgccaatgtccctggggggacaaatttgtccttggtttagaattgcttaaatagagagaaggatgaatggatacatatttatccaatgcagctaatacagcatatatatatatatatatactcatatacatatactcatatatatattcatatatatatactcgtatatatatacaagtatatatatatgagtatatatatatatatatgagtgtgtatatatatatatatatatatatatatatatttttttttttttttgagatggagtctcactctgttacccaggcaggagtgcagtgacacgatcacagcttgttgcatcctcaacctgctggactcaagcgatcctcccgcctcattttttgattttttatagagaggagatctcattctgttggccaggctggtcttgaactcctggcctcaagcgattctcctgcttcggcctcccaaagtgctgagattacaggcgtgagccattgtgcccagcctaatgcagcagaatattaacagctgtagaatctagccagtggctacttggaggttcattgtacactttttccccccaaattttctgtatctttgaaatgttccgtaagtattaggggaaaaatgcatacaccctaagatccagcagtaccacttactagtgactgccctagggaaaaataattggcctgcattcacaaagaggcatgtataaaaagatcctttaaaaaaaattcccttgtctaaaatagcaaaacactgaaacaatgtaaatgcgtatcaactcatcaactgtggaattttttttttttgagacggagtcttgctctgttgcccaggctggagtgcagtggcgtgatctcggctcactgcaagctctgcctcccaagttcacgccattctcctgcctcagcctcctgagtagctgggactacaggtgcctgccaccacacccagttaattttttatatttttagtagagacggggtttcaccatgttagccaggatggtcttgatctcctgacctcgtgatctgcccgcctaggcctccaaaagtgctgggattacaggcgtgagccactgcacctggcccaactgtggaatgtttaaaatgaactatgggccaggcatggtggccaatgcctataatcccagcagtttgggaggtggaggcaagaggattgcttgaggccaggagcttgagaccagcctgtgcaaacagagagactccatctctacaaaaaaaatttaaaaaattagctgggtgtggtggtgcatgcctgtagtcccagctactcaggaggctgaagcagaaggatcgcttgagcccagcagttcaaggttgcagtgagccctgattgcaccattgccctccagcttgagtgacagagtgagattctgtcacacacatacacacacaaaaaaaagaaagaaaagaaaagaaaagaaaaaagatccttaattacatctgcaaagttccttttgccatgtaaagtagcatattcacaggcttcaaggattaggatgcagacatctttgggaagccattattcatcctataacagtgattgtactattttacattcccactatcagtataaaagaattccagttgctccacatcctcaccaacagttggtgttgtcaatcttgtttattttagccattctggtacatttcattatgataaataatatacattaattttacacatttaaaaacattgggctgggtgcagtggctcacgtctgtaattccagcactttgggaggccaaggtggaaggatcacttgagctcaggagtttgagaccagcctgggcaacacagcaagacaccatctctatgtttaaataacaacaaaaataaaaacattattctatattcattattgccacaccgaagaattatacaggctaaatatcctctgactagtgaatgtatagacaaactgtggtatatttgtacaatagagtactactcagcaatgaaaaagcatacactactgatacatgccacaacatgggtgaatctcacatgcatcatgctaaatggaagatgccagactcagaggctatacactctgtgattctatttatataacatcctgcaaaagacacaccacagggaccaaaaacagagcagtgattgtcaggagcaagaaaggagttgactgggccgggtgtggtggctcaagcctgtaatcctagcactttcggaggccgaggcgggtggatcacgaggtcaggagtttgagaccatcctggccaacatggtgaaaccccgtctctactaaaaatacaaaaaaattagccaggcgtggtggcgggcacctgtagtcccagctactcgggaggctgaggcaggagaatggagtaaacctgggaggcggagcttgcagtgagcccagatagcgtcactgcaagtccggcctgggggacagagccaggctccatctcaaaaaaaaaaaaagaaaggagttgactgcaaagaggcacaagggaattttcaagggtgacagatttgttgcgtcttaattttgttggtggttacacaggtgtaagcatttgtcaaaaagcatagaactgaggctgggcacagtgactcaagcctgtaataccaccactttgggaggccaaggtgggaggatcttttgagtccaggagttcgagaccagcctgagcaatatagtgagaaccacccccatctctataaaaattaaaaaaaaaattatctgggtgtggtggtgcaaggctgtggtggtagttacttgggaggctgaggcaggaggattctttgagcccaggagattgaggctgcagtgaactgtgattgcaccattgtactccagcctaggtgacagagtgagactccatctcaaaaaaaaaaaaagttgtacactaaaaagggtgaattttacctcataggtatacacatataaattatatatgtatctatattatgtaaaactgtgtgcaaatatggctgggtatggtggctcatgcctataatcccagcactttgggaggccgaggcgggcagatcacggggtcaggagttcgagaccagcctggctaatatggtgaaatcctgtctctactaaaaatacaaaaattagccgggggtggtggtgcgcacttgtagtcccagctactcgggaggctgaggcagaagaatctcttgaacccaggaggtggaggttatggtgagccgagattgcagcactgcactccagcctgggcgacagactgagactccatctcaaaaaaaaaaattgtgcaaatatacacaaaaattataaatttgtacatatatttaataagcctgactttaaaaagacaattctggaggaagggtctgtaagttttatcggatgccaagggacccaccgcacgtgcacaaagactaagactcctgcgggggttgactgtgcatacctgtgtcacctgccacgatgggaatgaagggagaggaaggaaggacattccaaggaaaggacccttcccaggctcagattcaggacaggggtggcccctgggccaggagcccggagtgcagggagcttgcagaggagtggtagggaggaggaagggggtgggttgaaaccagatggggactcggtttctacctttgtcaccgggctattatcatctacacctctccatatattcgttaatcatacacctgctttatctgccctcccagcctgcattccattcgggcggacagatgtccctgaaggcccgagggacaccagccgctatgccaggctccaaagaacccgaggcaaaccaacgctggtcccggtctttgaggactccccggcccagtgagggagaccgacaggtaagcaggcagtgtccaagcctggggaagaggctgtaaggcagacaccgcaggcactggcagggctccctatggaacaatcagggaagacatcctgaagaagggggcattggggtgaggcctttcccccatgtaatgaggccaagcccaataataataatgatattaataataatggccactggccgggtgcagcggctcacacctgtaatcccagctctttggttttgtcatttgtttgttttgagactgagtcttgctctatcgcccaggctggagggcagtggcacgatctcggctcactgcaaccccgggttcatgtgattctcctgcctcagcctcccgagtagctgggattacaggcacctgccagctctttgggaggctgaggcgggaggattgcctgaggaagggagttcaagaccagactggccaacatggcggaaccacatctctgccaacaatacaaaaattagctgggcgcggtggcgcgtgcttgtagtcacagctactcgggagactgaggcaggagaatcacctgaactggggaggcagaggatgcagtgaggagagagcacaccactgcactccagcctggttggcagagcgagactgtctcaaaaacaaaaagtaaataataataataataatagtagccaccagcatttatcgagggcttgcaatgggccaaaatcactacgctaagcacaggacgtgaactaattaatttaacccttcaacagctgtaaatcttttcccatcctgccttcctgccttgccctccctccctccctccctccctccctccctccctcccttccttccttccttccttccttcctttcttccttccctccttcgagacaggatcttgctccgttgcccagactggaatgtgcagtcgtgcaatcacggctcactgcagcctcaacctcctgggctcaagtgatctgcccacttcaacctcccaaagtgctggggttacaggcgtgagccactgcacctggccagcagatacttttatcactatcccccttcttacagatccaggaacattgaggcacacacttgtttccttccctcaaaatgttcctgctgtggctagggagatggtcatggacacagtgtcagtctggtgaagctgtgctttgacggtagcagcagaaggcattgaaaggaagtgagaggagagagggactgattctggctggggaaggaacggagggttggggatgccgcttgcagaaggcttctgagaagcgattgccctccaggacagatccttttatagggcgtggactttggtgcatagaattccgtcatattttccgttcctgtttctctatcatttgtccatatcccgattttgctttctttcttatttttctctttaatgctccagcctcactcctgttacctcctctggtgccccataaacaaaccctaacacctttaacattcacgcaatcttgggtatgtagaaatgcttacagaccagacagcattgcttcgtgtaattatatcttctaaattgacacaaaggataaatgctatcttttaaattgtgctatagactgttttatttcctactgtttcaattcaacattaatttttttttgttacgttgttttttgttttttaaaacagagctggtgccttagcctcccaagtagctgggatcacaggtgcgcaccaccacgcccagttaattcttatatttttagtggagacggggtttcgccatgttgcccagggtggtctcaaactctcggcctcaagcgatctgcccacctcagcttcccaaagtgctgggattacaggcctgagccaccatgcccggcccagtattatgtttttatgatctctccacgttaccaagtgaaactgatttattgcttccaggacaacatggaggaatccactcccttttgcttaccagctccccacgaaacagacctcatggtgttctctacctccctattcccacccgtaatgctgccctggtcatcctggggtatgtccttgtatgttacctgtgcatgcttctctatggtacctacttggaagtgggatcgctggatcccgggagaaatgcacagtgaatgtcacaaaattctgccccattatctaaggtgggtcttgaagctctagcagcatgtcaccaggcagagaagggcggagaagggaccaaccagttcaaaggactgagagtccacagcatgtccagggttcagtgaattataggtgacccacccgaggggtggaacctttcagggaacagccgtgtaataaacacttgactgcactggtttctttttcattttttttttttcctaaaaaggaaaatagtcttgttgtgggtggcagcttggcaacgtctatgaaaatcttaactgcatatactctttgacctagcaatatcactactcatgcatgaggaagtaggaagaaggaggctcagtgtgttgcggtctgtaaaggtggaacaaggaaaaccaccagcagccccaccaatcggcgaggagtcaaaggaaccatagataggctgcggctattggatactgtgtggtgtagacaagataaaggtgaattaaaacataggagcacaggctgcgcgcggtggctcacgtctgtaatcccaacactttgggaggctgaggcgggtggatcatgaggtcaagagatcgataccatcctggccaatatggtgaaaccctgtctctactaaaaatacaaaaattagccgggtgtggtggtgggcgcctataatcctagctactggggaggctgaggcaggagaatcgcgtgaaccgaggaggtggaggttgcagtgagctgagatcgcgccactgcactccagcctgggcaacagagtgcagctccgtctcaaaaaggaaaaaaaaaaaaaaggcgagccagatttccctatatcaagtatcatcctatatccctgaactcaagagatcataatatttctcagttctgaatctatatatgtaaaccaggagttggcaagctttttctgtaagggctcagattgtaaatattttcagctttgaacatatggtctctgtcacaattgcttaactgcgtccttatagcatgaaagcagccacagccacagacaatactaaaccaacaagcatggctgtgttccaataaaagtttatttataaacccaggcagtaggccagtgtggcctgtgggctgtcatttgctgaccccaatgtaaataaatagtaaatgttagatccggctcagtggctcatgccactgagcactttggggagccaaggcaggacgatcacttgaacccaggagttcaagaccagcctgggcaacatagtgacacctcatctctacaaaacaataaaaaaattagccagacgtggtggtgagtgcctgtggtctcagctactctagaggctgagatgggcagacagcttaagcctggggtggcaagtttaggctgcagtgaactgtgattgcaccactgcactccaggctgagcgacacagtgagaccctgtctcaaaaaaaaatatttgtggaagaaattacaacaaaataccaggggtacatctggaaggcagagtgaaaaggaagggcctggtcaagggaaatattaccctcgtgtttacattttttctactttgtgtaattaaaattgctttaaattaaaaagaaaaaagtgttttaaaaatagctttggtgaccttcttctttctgatcagcatcttagaaatgccagcagcagcagggcctagtgggtcacacctataatctcagcactttgggaggccaagaagggaggatcagtggaggccaggagtttgagaccagcccgggcaacgtaacgagaccctgtctctatttattttattattactattttttattttttgagacagagtcttgctctgtcacccaggctggagtgcagtggcacgatcttgattcattgcaacctccacctcccaggttcaagcgattctcctgcctcagcctcccaagtagctgggattacaggcgcctgccaacacacccagctaatttttgtatttttattagagacaggggtttcaccatgttgaccaggctggtcttgaactcctgacttcaggtgatctgccagccttggcctcccaaagtgctgggattacaggtgtgagccgcagcgcttgggccccatctctatttgaaagaaagaaagaaagacaatgccggcagtacatgaaagcaatgaggaagcaaagttctctagcaccctaccagctagaggagaatttctcagagagtttcttttattcacttagcaggtatttacccggcacttaccatgtgcaaggaactgtcctaggtgctagggatagaacagtaaatgaaaccgagtccctcccctctatagggtggatattctgcagtcagagagacaggcaacaaataacaaacacaacaaataaataaatggtatagcaggtgagaaggtcagaagtgctatggaaaggcagaaacaaggggcaagtaaaggggatggaggtgcctggtgccaggtgaggcattaaacagagtgaccagagaaggcttcattgcgaaggtgacatttaaacaatggcctgaatgaatgaggcgagagctagggggatgtctgggaggaagagtgttccaggcagaggcagcagccgtgcaaaggccctgaggtgggaacgtgtcggttgcatttgaggaacagcaagggagcaagttggctgtagtggcatgagccagggggagagggtgagaggtgaagagaaatgaaggacaaagcaggtcacagcctgcacagccccgtggtccatggtgaggactttggttttactctgggccacggtgaggtgggggcggtgtctgagcagaggagggacaggagctaacttgaggtctaagagggtcctctgactgccctgtgggagcagacgcagtgggaagtggggagaccagagaggaggcacctgcagtggtccagaaaggagatgatggtggatttgaccagagtgaggcagtgggggtggcaagaaggggtcggattctggagctagagctagagattatatagatatagatttttttttgagatgaggtctcactctgtcacccaggctggagtgcagtggcgcgatctcagctcactgcaacctctgcctcctagattcaagtgatcctctcgcctcagcctcccaagtagctgaaactacaggcatacaggcatgcgctaccatacccagctagctttttttttttttttttttgagatggagttttgctcttgtcacgcaggctggagtgtaatggcacaatctcagctcactgcaacctctgtttcccaggttcaagcgattctcctgcctcagcctcctgagtagctgggattacaggcatccactaccacgcctagctaattttcgtgtttttagtagagacagggtttcaccgtgttggccaggatggtctcaatctcctgaccttgtgatccacccgcctcagcctcccaaagtgctgggattacaggcgtgagccaccattcccgaccttttttttttttttttgagttggagttttcgctcttgtcgcccaggctggagtgcaacggcatgatctcagctcactgcaacttccacctcctgggttcaaacgatgctcctgcctcagtctctgagtagctgggattacaggcgtctgccaccacgcccagctaatttttgtattttcagtagagatggggtttcaccaagttggccaggctggtcttgaactcctgggttcaagggatctgcctgcctcagcctcccaaaatgctgggattacatggcatgagccgccacatccgatcagattctggatatattttgaaggtcacattgacatttgctgataaactggatgtagaggtaagaaggaaagaggaatcaaggatggcgctaagtgttttggctcaagtacgatcaagagccatctgccacagatcacctggggactcgtaaaaatgcaagtccctgtccccgcctggatctactcagctggcaactctgggtgggacccaggaaactgctttctgagtaagctgcccaggaaaagactagaaacccagaggcaaccatgatcctcttggggtgggggggggtggtcgtctcagggtagaacattagagtggttgcaagactccccaggttcaaatcctggccctgccattccacctatgtgagctggaatgataccttaaattctcccagccacagtttcttcatctgtaacaagactatcgatggtgcctgcctcacagggctgacttagggcctgaatgagttcatgtgtataaaatatataaaatggtgccaccacatacaacttcccaataagggcagctagaattagcatccagttccaaagatgatgaattcttctttttttttttttttttggacagtcttgctctgttgaggttggagtgcagtggcgcaatctcaactcactgcaacttctgcctcccaggttcaagcaattctcctgcctcagcctctcaagtagctgggattacaggagcctgctaccatgcctggctaaaagatgatgaattctaataataaaatccacaccaaaatattatcaggtgtcagaggtacattttgttggttaagtgaaacagaggatattggtcaagggaaacatttctctatcccttgattttttccatcttgtgtaattaattaaaattgttttaattcaaaaataaaataatgttttaaaaatagctgtagtgggccagtcttggtggctcacacctgtaatgagcactttggttggcaaaggcaggaagatcacttgagctcaggagttcaagaccagcctgagcaacatagggatacccccatctctacaaaaaaatctcaaaaaaaattagctgggcatggtagcacatgcctgtggttccagatactcgggaggttagatgattcaatatgtatatataagtaagcccaagcatcataaaagtattatctattattatttggccaaacatgaggagtcagacgttttctcaaagggggaacttttagttgggttttgaagtatgagtaggagctcaccgggtgacaaaaagtcatacttcctttcattatcttagtcaagacactcccttgaggcatgctgtgttccagatcttgtgctgggagatcccagggacctaacatgagtctgactctgacctacgcggagctactagtcccagggatggatcagacctaagccctgtcctctagtgcctccaagctggtaggagaggcagagagggatacaattcagggtgaccagggcaagcagagagaggaacagagtgagtcatggactccgagcaggtcagcactgagcaaaagctttgaaatggctagtctgacccccctctcccatttactaaagcctggagagggacagggtttgctcaagattacacagaatgaataaatatcctgatcttggagtctggggatttcaaggaccaaacgagatgccagagatgcagacctgccccctcgcagacccttcacccagatgcccaacacaccccaaatccccactcaaatctgcagactaacccctggccccgcagacaatgatgctgtcagagatatctgcctccccagccctcaggctcagagacccacttcatccctcacccacatgcacagcacacatccctgcaagcccttatcatcctatgtgccctgtgctgggtcaggctggacacagacgtgactcagatgcaggttgagccctggaagggctgctagtgtggaaaggtaccaggagacagagcatcccaacccagtgtgaagagtgtgtggaagccgtggcagggcatgggatgggaggagggtgagatgagatgagggaacccttaacacgctttgaaccttgggaagttcacctggagtttcctggcatggggagatggaaagagggagtaacaggcagaaagcacagcatatgtgaagccacaaaagcatgaaacactatttattccttcatccatccatccatttatccattatccatcatccatccatccatccatccatccatccatccatccatccatccatttatccatccatctatccatttatccatccatctgtccatttatccattcaaccgtccatttatccatccatccacccatccatttatccacccatctatccatccatccatttatccatccatccatccatccatccatccatccatccatccatccatccacccatccatttatccatccatccatctgcccatctgtctgtccctctgtccatctgtatgtttatctgttcatgtacttatgcattaatcgattcttccatccatcttatttatttattcattgtgtatatcattcattcattcattcatgtatccatctattcaaatgatcatctgccccctcattcatccatttatttatccactcattggtcacacatgcatccgttcatatagttatcagcatcagctgtcatatgatccttccccagcaacacctcctcagagagcctttccgaaccctttctaaaataatacccagccaccttgcctctattaccctcctttttattttcatcacagccctgaacgagacttgccattttgccctgtaattgtatgtttacttgttcggtgtctgtggctaccatgagaacatgatcatttattcaatgagtgtttctctctttttaaaatttaacttttaggggtacctgtgcaggtttgttattaggtaaattgtgtgtcacaggggtttggtgtatggattatttcatcaccccagtaataagcatggtagcccagacaaatatttcttgagcatcactgtgtgccaggctctgttgtagacactggggataacagagacaaaatccccttctgcatgaagctgacattctagtggtgatgtcagacaataaacataaacataaataaacataaaggtagtaaataaattataaggcatgttggaaggagggtgctgcggcaaaagaaagcatagagccaaatgagggtgtcaggggtccagggggatgggtgctcaaggaagacctcaccaaggaggtgatagctgaacaaacgctgtgggggagagaaggagcccaagcggttatccaggggaagagcattgcagttagagaatggcacatgcaaaggccctgaggcaggactgagcctggtgtgttttggggacattaagaaagccattgtggctggaatggaatgaggaaggaggagagagcaagaggtgggggcagagagggcagagaggggacagaggggaccagatggagcagggccatgtgggggaagactctgttttcactctgagtatgaccagagccagaggaggattctgagccaggaagaaacaggatccaactgcctgcaggatgtggttccctctgcctgccatatagggagtagattaatacctgagttttgtgagagccaggatcatgtctttgcacctgtcgcctcctctgtgtctgggtgaagtctgggtggggcacagtggctcacatctgtaatcccaacggttttggaggccaaagtgggagggtcgcttaggcccagaagttccagaccagcctggacaacacagcgagaccctgtctctacaaaatcttaaaaaaaaaaattagccagggccaggcacggtgactcacgcctgtaatcccagcactttgggaggccgggttgggtggatcacggggtcaggagttcaagaccagcctggccaacatggtgaaaccccttctctactaaaaatacaaaaaaaaaaaaaaaaagctgggcgtggtggagcgcatctgtaatcccagctactcggagggctgaggcaggagaatcgcttgtaccgggaggcagaggttgcagtgagccaagatcacaccactgcactccagcctgggggacagagcaacactctgtctcaaaaaaaaaaaaaaaaaaaaattagctgggcatggtggcaagtgcctgtagtcccagctactcaggaggcttagttggaaggatcgctcgagcccaggaggttgaggccgcagtgagccatgattgtgccactgcactctggcctgggtgacagagtgagaccccatctcaaaacaaacaaacaaaaacaacaacaacaacaaaaacaaacgaaataacaataaacaggagtctgcaaactacagactatagcccactggccaaattcctcctgtctgcataaataaagttttattggaacactacctcacctattcatttgcatattgtctctggctgcttttatactgcaaggacagtgtggcacaattggagccaaggcttctgtcccgcaaagctgaaactatctactgtctggccttttacatgaagaagtttgctgacccctggtctagaacaattcttggcacacagtaggcactcaaaaaataattgttgcagaactgaacctgtcactcatctgtgacccacacggggttgctagcttgctcttgtctcagagccagttccagctccgagtcacatgcaggaaaacaacagcccagcgaccaaaaataaaatactggaaccattccagtctttgctgcagagaaaatgcccaggcaggattgcagtcaggacccatggcaaaacttagcaccctcttcctccttttgctctagtaagactcaggcccctttccctccatcaggcatggaaactgctccctaattttttttgctcaaaatttccccccaaactctcttccacaaagctgccctgtccttggttctcccgtctcttcccctttcagctccaactttttatcttctttttctttttttctcaccctgtcttttggtgctgacagctttttgttttcatcagcttagttccttgctggctttccccacacctgtgctgctccttactcagattctgcataacgaggtcacgtctgggggctgtgccagctggtgggaatccagcttccctggaggctcagaatgcccccatattcccctttccttttccccggcacacacccgtcgtggtattccatcccccttcactgtctgggttccctctctgctgcagctgatacccacaggacccacagaggggtcagccctggacagccaaggactcacaatttaatgtgaatgatcccagtgcctggagttcagagagggatggctgacggggtggccttgatccctgagataatgagtttggggctttatcctgaggaccttctctggcaggcctggatggaggacagatggagaacttagaggcagtggagtgcctcctttggacttgattttctgggtctcagcctccctctgctggctttgtgcagcccaagctctacagccagactacattgattcgaattcaggctctgccacctttaaactgtgcagactacattgatttgaatgcaggctctgccacctttaaactgtgcaaccttggtcagctgtgcctcagtgtcctcatctgtaaaatgggtttgacattagaacttaccacttagcgttatcaggaggattataggatttagcacacagaaggggcttagaactgtgcctggaacacagtaagcactcaataaataccagcaactttcaaaatgctgatacagccgtccaccacatagaatgccctccgcaaaagaaagctcattactatcactcagtgatgtcatcaattacctcatagactgagcagaattgatgacatctccaattatgaggtcaatttagaacctggtgggcatgatgatatcacaagttgccaggtaaatctacctgggtaatcccaggctaaatctagccctgggtagtgttgatgacatcaccagttaccaggcagattatagttaaaatgtgggtgcccagtgccttctttcctgtttgaaattctgttgtgtcccagtccatactctttcctagcaccgttgggaacaggactttcatgtctctggacctcaatttttctttctttctctttctttctttctttcttctctctcttttttttttttttttttttgagttttttgtgatagagtctcagtctgtcacccaggctggagtgcaatggcacaatcttggctcactgcaaactccacctcccgagctcaagcaattctcctgcctcagcctcccaagtagctgggactacaggcgcccactgtcatgcctggcttatttttgtatttttagtagagatagggtttcaccatgttgggtaggctggtctcaaactcctggcctcaggtgatcctcccacctcagccccaaaaattgctgggattacaggggtgagccactgtgcctggcgtggacctcagttttctatccatcaaatggggataataaaagcaccagcctcgtagggttgtggagagaatccaatgagttaatacataaaagggcaaaatgtccagcacacagtcagcactccatacacagcagcactcattatctttactgtaggatgtttccatggagcacgctccagccagagtgacaggagccctcagctctgtcttggttaagacagatgcctgcaggggcctgtttcctaggagttggagcccagatccgccattagcagtagtcaggagaccctggacatgttgctagcctataaagtggggtaatgaccatgccagcctcacggggctggcatgaggatgcactgacataatgacagtcatgtttccagcacacaatcagacctcacaactgtgagctgtgttatcactgcgagtactctcagaaaggtccttttctccccaggatgttgtttccccatctgcaaagaagtggaaggtggctgtggcaatctcaaagccatggcaatcttgacactatgaccacagggatggtcctgtgattcacctttgctgttgctgagcaagtgcattgggagttggatgcttgaatctgtgtctgccctcagcacccaactccagcttctcttgtctcttttctgcccatctcttatctcccaacatttcctttcatatttctttggcttcttgctcgtacgctagacttcgtatgtatatagtttctctcctgcatgctgtttgtaggacaataaatggcaatagtcatgataatcagtattttctttttcttttctttcttttttttttgagatggaatcactctgccacccaggctggagtgcagtggtgctatctccgctcactgcaacctccgcctcctgggttccagtgattctcctgcctcagcctcccgaaaagctgggattacaggcgtgggccactatgcctggataatttttgtatttttagtagagacggggtttcaccatgttggccaggctgctctcgaactcctgacttcaagtgatctgcctgcctcagcttcccaaagtgctggaattagaggcgtgagccaccgctcctggccagtactttcttattcagccttttccctggtgccaggactgtactaagagctttgtaggcactaattcacttaatccactcaatacaagcactcattaccatttactcaacaaacacttattaaacacctactgtgtgccaggcactgaggattcggcactgaacaaaataaagatctttgtcctcgtgggacttaaattctagtgaggagacagatgataaacagataaattagcaaacactcccagtgctatgagaaaaagcaaagcggggttaaacgagagagagtgatgagaggaactgtcttatataggatggccaggaaaggcctcttggaagaggtgatattggagcagaacggatgatgtgggagagaggttgtcatgcaaaacctggggaagagcattcctggtggacccaacagagaatgcaaaggccttggggcagcaccaggcctcctggtttgagaaattgagccagtgtagctggagcagtatgaaggggagggcctgggggtgagatcagagagagcaaaagggccagccacatcccgcaggacctcattggccatggtgagttcttagacttttactgagtgaaatgggagccatggaaggctctgaacagaggaaaggccccatctgaatagagtagactgtagggagagcaagggtgaaggcagacagtccatcactcccattttacgagtgcagaaataaatggaatctcaaaaaagtccagcaactggcctgagcccacacagctgctgagcagccgagccaagctggcaggcctccttgggttcagtggagccattcctttgtgcccttggctctttttattttccttttaaatagagatggggcctatgttgcccaggctggtcttgacctcctgggctcaagtgatcctcccaccctggcctcccaaagtgttgggattacaggtgtgagccacggcacccttccaaccttgggaagtcttttggctctcctgagcctcagttttcccatctgtaaattgtaaatggggaatcattaccacgtttgggcatagcatggcggttaaaagcacaacttctggttggatctgagtccttgctctgccatcggccagctctgtgactttctgcaattaacaccctctttctaagcttggggttacctcatctagaagatgaagatcttaatagcaccaatttcaagggcttcgttgtaaggattaaatgagatcatgcaggtaaggcgcttagcacagctcccggtctacatcgaagtgcttgataaacgatcattgttattccgatagtatcacggcccacacctccccggtgggtgagagcctgggagggtgcctggtacatggtctacgttcgacaaaagtgaattctgtctcctgtctctcctgcccgccgggtcccgggggacccaggcattccggccttcggtcggcccccccacgccggcccttacaaaggcccccattcatgccttgcgcacaaagcggcccattcaccctggccccttgggcctcccgcccccggccgccccccgcgcctcgctattggtggcgccccgtgcccatcaggcctcggcttccacccccgaccgcgccgcctagctccgcgcccgggccgcgttcttttcccacggctggcacccttcgacaacttctgattggcccagcccgccagccgctctttttgattggcggctcccgtcccccaggggcggggccgtagcttgccgcagcgggcgccgattggcctctgctgctctcttgggggcggggctgtcctggcggacacgcccctctttctccccaggccgaagcctcgggacggccctggaagccggtgagtgcccggggccggcagccctccgggggcggcggaacgggactgagccaggggaagctggagcctgggggctgcgatcggggcccgggagcccgggcaggcggccggggacggcggggaggtgacgcggacactcaccttgggcgcgcagcgggacggcggcgagggaggtgggggggcgggacgtctacactcccccaactccagttgccgccgtgtgcgaggcccggtcggggtcctcgttgtcagccccgggcctgttccgcagaaggggaaactgaggctgtctttggaacctcggccgctttaatacctgagtcatcgcctccagtcccccgcccccagcatgacatgtctctgttctcacgtgtcagaatcggaggccagagagaggggtcgtgactggaagaggcggaggggtagggaaggacatatttgagaacctatgatgtacttggacgcttttattttttataactaaataatttcctttccttatcgtgttgactcgaggtgagttatattgtacccattatacagagaggggaaggctgagactgggccgaattggtgactgcagggggacctggtggagaagaacactccagagaccaactgtgtgctgggtcctttaaccttttcagtcccacaggagtcccctaaggaaagcggtggtccctgtggcatagatggggaagcaggttggtagtaatcaccaactgggacgcagaaattcatgtctttagggacctgctacaagttctttccagaccccctcctttagaatggcagaaaacggtataggcttgaattccagacctccctcttacgctgtgtgatcttgagtgccttactttgacccttcctgcctcagtttccacatcagagaaatggacatgctgatcacccctatgtcattggttgttgaggttattctaggccgggcgcagtggctcaggcctgtaatcccagcactttgggaggtggaagcgaaagaatcgcttgagcccaggagttcgagaccagcttgggcaacacagcgagacttcgtctctacaaaaagtaaaagagttagccgggcgtggtggcgtgaccctgctgtcccagctactcgggaggctgagcagggaggatcggttgagcccaggaggtcaaggctgcagtgagccatgatcgtggcattgcactccaagctgggcaacagagagagaccctgtctctccctctttttttttttttaaatcattttatgatctcaaagagctgttctaagaggagaaaatacccgacacatagtaggtactcttatcaccatgtagtctttatttcactcccgagactgaagctcaggacagaataccattgtcctcttctttggtactcttactgtctatagattttgttgttcccttcccgcagttgggaaactgaggctcagggagattaatgatgaagcactgggctggggaactttctgaacgtcgttttattaatttcactggccgcaatgcacagcagggaaagctgaggcccaggaagctccagcggggtttgaatcccgggaatcctcagccttctccgcggcgggccctcgacctttgccctccataagggggaggagcccctggcgccgccgccgccgccgcccacctggcaacaggctcaacccccgccttcccccggcccccgtcagaggccctgaagctccaggcccgccccgttcccagccgggcaggtgctgggtgacatcagagccgggctcccgccctgtgacgcgacggggccccgccctgcgctggaccgcggaggtcgctgcacctgaagagaacggggattcccgcgccctcaccccatctccccgctccggtcggcgcccccaggtagccccgaggatctgcgagttgagggggcggcgacacaggcgcttgggtccaggggaatgggtacggggctctcagactcctggatctgagaaggggccttgggggccggctgtcccaggtctgaggaaggactgcgccgcgagcccgaacttctgggtcctgggggaggaaaggactggggccaggactgcagagctggggtcttaggggaggagggggctgcaagcccggattctggggtctgtaggagcaggggctgggggcctgaactcctgggtctgagacaggagggcattgagtactgggactccggaaacccagcgctagaagccagggtcagacggctggatgccaagggccccaacctctgccccagggcggatccctggctgcttttctttttcaagcccagcagtctcggcccctcccagggcaggtgctttcacctgcccaggtgacagtaattagccctggcagagtgttcctgctggttgaggaagggtagggcagtcagagaggctcggccacttggagccaaggcctgcaggccctgcccgccccatcagggctgtgatccatcttcagaactcagcatcctcacctctagcccggctgcagtgaggtgagggggcctgcacttcccaatccataggaggagggggctgggggctcagactcctgggtcctgggagaggaggaggctgggagctcggactcctcagcctggggaaggaaagggctgggggcttggactcttggctccagggaggagaggcatagggcatagggtgattgcaaaaactccgaaacccttcctggtcaaaggccacagggctggtgaggaagtggatggggtggggtggggtgggtgggggtgagggtaaagtcccagggatggagtttgggtccggtgtatccaggtcacactggagatatggggtgagccttgacgatttgggggccacggggtggagaaactccctgctgccttcagagtgcaagggtccagcgtttgaggcctgagagcctcagggccaagagtcactggaagctggagctgctgggcttggggatgggaggagagggtctgggaggaagtgggtcctctcagcggagctgggattcccgtgggagaggcttgagggaaaggcaggagtctgttgggaccagatccaggggggcctccagggcagctgggcgtttagaaggacttctccaggggtatgtgggagcgaggtggggacggcagttgcatataggtctatcgggcagaggtgaagtcctgctgttggggagacagaaatctcccactgtttctgtgactgatgtggtggggcagtgatggggacatttgaggcagtggatgagagtaggggccgggcgtagtggctcatgtctgtaatcccagcactgtggaggccaaagcaggaggatcacttgagcccaggagtttgagatcagcctgggtaacatagggagaccctgtttctaccagaaaaaaaaaaaaaaaaaaaaaaaaaggctgggcctgatggtgcgcacctgtggtcccagctactgaggaggctgaagtgagaggatcacttgaacacaggagttgaggctgcagtgagctgtgattgtgccactgcactccaactccagcctgggcaatagagcgagacctatctctaagaaaaaagagagagagagagagagaaagagagagagagacagagagagagagagagagagagagagagagagagagagagagactaggggcagacttctttagcaggagggggccacgcagcaggatagggagaatatttttcctgcctggtgcttggaccgcgttggaattgccactactgcccatggcccgctggatggtgggaggggcctaacacattctagttcccccagcacctggttgcctccgagatagctggagctggatccacccctaggccaggagctcctccaggcagggctcccagcctactcttctctgggtcctcaggcccactcggggcggagtctcgtacttgaaagtcctcagagagttgaatgaatgggtccagtctccccattttatggagaaggagtcaggttccagagaaggaaggaattgttcactgaagcagtgagattcgagtctattctgcaggcatgagataggcgtgaccagaggtggtcagggaacctgaatgacaaaaatcaggtcaattcccaccctgggctcatatcttagagtaaaagcaaggttgtaccttttgtcccctctcttacatcccctcccaccctctgcccctcgatcatttggctctagccatgctgcctacctcacagtgacacagccacacagatgcattgtggccccaggacctttgcactgctgtctggaatgatttttctcccaacaacccccttcctcgctcctgtcatctcccttgggtcttcatttaaatgccacaccagagaggccctccctggccaccctaatgaaaacttcaacatcctcaaccctaacatttcctgtcccctggtttattcctccccttggtatttatcaccatttaatgtactatctggccgggcatggtggctcgtgcctgtaatcccagcactttgggaggcccaggcgggcggatcacctgaggttaggagtttgagaccagcctggccaacatggtgaaaccccatctctactaaaaatacaaaaattagccaggcatagaggcatgcgcctgtaatcccagctacttgggaggctgaggcaggagaatctcttgaaaccgggaggcagaggttgcagtgagccaagatcaagccactgcactccagcctgggtgacagagcaagactctgtctcaaaaaacaaaaacaaacaaacaaacaaacaaacaaacaaacaaaaaaacccaacaaacccaccaaacataccatatttggtttctgtaaaaaaataaaaaagagagagagaatttttaaaaaacaaaaaccatactatctaatttacatttttaatctttttatctgtctcctgggattacagcagctctgtcaaatagcaatataatacaggccagatgtgtaatgtaacattttctagtagccacatttaatgataaaagtaaaaaaggaacgggtaacattaatttaatgatatattttatttaacccagtagattgaaaatattatcatttcagcatgtcatcaaatatttaaaatctcagcaaactatctttttgttgtactaagtcttggaaatctggtgtgtatcttacacttagaactccagatggggatatttatatttaaattttaagatggggctcggtggctcacacctgtaatcccagtactttggggagccaaggcaggaggatcgcttgagcccaggagtttgagaccagtctgggcaacatagaagaccctgtctctacaaaacaaatttaaaaattagtaggcatggtggcatgcctgttaatacatttattttttaattaataaatttcagacatgaatcacctgaggctgggaagtcaaggatgtggtgagccgtggttgtaccactgcactccagcctgagcaacggagtgaaacctcatctcaaaataaaataaaatagattgaatttaaatgaatgaaattgaaaatgtgtttcctcagtgacacatgccacattgcaagtacccggtagtgcacaggtggtggtggcttctgcagtggacagcccggggctagaaagtaaacttttggaggcaggcgtcttcttccagcttgtctgttgctccattgtcagtgcccagaactgagcctggccaggagtggtggctcacgcctgcaatcccagcactttgggaggctgaagagggtggatcacctgaggtcaggagttcaagacctgcctggacaacatagtgagaccctaatttctacaaaaattgaaaataattggccaggcgcggtggctcacacctgtaatcccagcactttgggaggccgaggcgggcagatcaccaggtcaggggatcgagaccaacctggataacacagtgaaacgctgtctctactaaaaatagaaaacaatagccgggtatggtggcaggcgcctgtagtcccagctactcaggaggctgaggcaggagaatggcgtgaacccaggaggcggagcttgcagtgagccgagatcgtgccactgcactccagcctgggcgacacagtgagactccatctcaaaaaaaaaaaaaaaagaaaataattagccggggccgggtgtggtagctcatgcctataatcccagcactttgggaggccgaggcaggcagatcacctgaggtcaggagttcgagaccagcctggccaacatggtgaaaccctgtctctactaaaaatacaaaaattagctgggcgtggtggcagacgcctgtaatcccagctacttgggaggctgaggcaggagaatcacttgaaccctggatgccgaggttgcagtgagctgagatcacgccattgcactccagcctgggcaacaagcgagactccgtctcaaaaaaaaaaaaaaaaaaaaaaaaaaaaaaaagaactgaccctctgagcctggttcacagcctagcttattaaagaatgaatgagtgcctagagaggtgaatgaatgaaatgagtaagctgggtctgttaacccactttgcagaagtatggcaagaggtctggtaaaggaaggcagaggtggctgcctggggaatttggggtagggaagggaggcccgggggacggagccccatctgacccccaccctctttctttgcccctgcagaccatggcagccgtgaccatgtcggtgcccgggcggaaggcgccccccaggccgggcccagtgcccgaggcggcccagccgttcctgttcacgccccgcgggcccagcgcgggtggcgggcctggctcgggcacctccccgcaggtggagtggacggcccggcgtctcgtgtgggtgccttcggagcttcacgggttcgaggcggcggcgctgcgggacgaaggcgaggaggaggcggaggtggagctggcggagagcgggaggcggctgcgactgccgcgggaccagatccagcgcatgaacccgcccaagttcagcaaggccgaggacatggccgagctgacctgcctcaacgaggcctcggtcctgcacaacctccgggagcggtactactccggcctcatctacgtgagtgggctcctgctggggggcgcgtgcggcggagttgctgccggttggggaaccaggtccaccacccggctcccctgcattaacttgaggctgtttatcatctgtatcccatgtcccgtgactgttcctacacttacatggttgccaaattatgaattgttggattactaggacagcctcggaacctactggggacattgcatgatacatatggtagataaactgtattattttcctaaagtataaaacgttccaatttctcagatatagctcatcccgagttttaaggaacggaaacagatgtgtgacaatcattaatgtgaatcactgagtatagaaatgtgttgcttgaggttcaagaccagcctgggcaacaaaacgagaccctatctcttaaaaaaagataaattagccaggtgtggtggtggcccgtgcctttagtctcaccttctaggaagactgaggcaggaggatcacttgagcccgggaggtcaaggctgcagtgagctatgatgataccactgcactccagcctgggtgacagcacaagaccctgtctcaaaaaaagacaaaaagcaaaaaccttatgctaggctctgtgctaaatgcctatctattaattcattcaatctcaccataggaaagatagagtctattattattaccattttacctaagaggcaaatgaggcccagagagagttaataacaataaaaatgaacatttattaaacatttaccaaccattcttccaagctttctaaaatacattgcctctgtacattttcagaattataaagcatctgatcctcattttacaggtaagaaaactgaggcacagagagttcaaggtcacacaattagacctgacagagccaggtagtctgtcttctcactttgctgtggtgcctcttaagattgagatggggctgggaatggtggttcatgcctgtaatctcagtactttgagaggctgaggtgggtggattgcttgagcccaggagttcgggaccatcctgggcatggcaaaaccccatccctgcaaaaaaaaaaaaaatacaataaattagctgggcatggtggcacactcttgtagtcccagttacttgggaggctgaggtgggagaatcacctgagccctgaaggtggaggctgcagtgagctgtgatggcgctactgtactccagcctgggtaacaaatcaagaccctgtctcaaacaaaacgaaacaatacaaaaacccattgagaagagattgatgatacttaggttgactatggtagtcttcccacgtctgtgctaagcattggaggttcgttgcatttttaaaactctttacagcaaacggatggggtagagcagtggttcttaaccccacctctatggtagaatcatttggggaattcttagaaaataccagtgacggagccccaccccagaactttcagtcgagctctctggggctgtgacatgaacattggtatttttaataagcttccaaggaggttctaatgggcagccaaggggttattaatttcattgaacaaaagagcaaacaggattagagagattgacaaggaatatggacaatcataatgaaaaataataataagaggaggctagcaaatatttaatcgagcactcgtgatgtgccaagcactgttctaagtgtggcgtgtgagttatcagcttccctctgggccagggactgctgatatcacctgatgttcaggatgttaagtgacccacagccatgaaggaatcacgccaggatttgaacccaggcagctggttccagagtcatgctccaaactctagcttagactggtggggtctcacagctttgctccaacatccacccctctgaggttcacaaagcggaagattagaatatttttgtgaagtcccactcctacttggagatcgaggctctgagataagcagtggctggctcagggtccctcagcttgtggtggcaggtgtggaatttgaatcgagggctgtcggaccctgcatggggttggtgtcttctccagtctgcactggccctttccaaatcctcaaacacctttactagccctggaaaagaggcctctacatgatccactcccccacatctcacccaaggccacagacatcaggatgacatccaaaacatggatccactagttgccttttattcatttatatatattttttgagacagggtctcactctgttgcccaggctgcagtgcagcagcatgatcttggcttactgcagccttcacctcctgggatcaagcaactctcttgcctcagcctcctgagtagctgggactacaggcgcctgccaccaggcccagctaatttttgtatttttagtagagttggggtttcaccatgtttgtcagagctcgaacctctgagctcaagtgatctgcccaactcagcctctcaaagtgctgggattacaggggtgagccactgcatccggccactctttgccttttaataaatactctgagcgctcccagcaaccttgtaaggtatctgctgtcatccccgctctgcaggtggggaagctgagcctcagactagggggcaggatttgaacataagccccacaactaggaaccagctaagctagaacttgaaaccaggtcactgtgactgcagaccccaggtcctagccattgcactaggaagattattcagaaagttcaggagaaaaagtggtagggcctgagctaaggtggtggccagggagccagacttttggggcctaagaaatgaatgtgagagagaagattctagaattccagacaggaagcacattgggccttaataaagatcattagcacttagtgagtacctgctttctctgctgggtgctgttctaaatttctttccaatatgatcttattgaccccctccccatccacataaggttgtgaggtagggattatcaccctctttttcccacagcttggagaggggaagccatttgcccaacagaagctgatagtggctaaaatattgagcatgcagtgtttcaaggtccatgttctgttttttgtttgtttgtttgttttagacatagccttgctctgtcacacaggctggagtgcaatggcatgcttacagctcactgcagctcaacctcctgggctcaagtgatcctcctgcctcagcctcctaagtagctgggactacaggcacataccaccaagcctggctgattttttaatttgttgtagagacagtgtttcacaatgttacccaggctagtctcaaactcctggactcaagtgatcctcttgcctgggcctctcaaactgctggatttacaggcttgagccactgctgtgcccagctggggttcacattaaaccctctgcatgccacatgaacttgtggatgactcccaggcaccttatgtaggaagcactatttctgtccccgttagctaaagacactgagaccctgaaaggttgcttgctggagccacctggcctgaaaatgttacaggtgtgattcaaactctgccctatttaagacctgtgcttaatacatgtttgttgactgaccaactgatgatggggatggtggtgttgtccagtgaaaagtgggacatccagggctccagaaacccagtttctgccactaataggctgtttggctttgagttgctaagagtctcagtccctttcctgggacccttggggcagggagggaaccccttcgtagaacaccccgctctgagaaacacggaagatgcattatgtgatttcacactcagaacacttctaggtgatgggttaaaagccgcattttccagggctggaaactgaggtttagagaggacacatccttcattcaaattcacacacagctcaaaaatgctgcatctgaatttgaacactggatggcttcaaagtctgagtgatgagcctgagagtttgaggctgcagtgagccaggatcgtgccactacactccagcctgggcgacagagccagactctgtcccacccgcccccgtccaaaaaattccgagttagcctagggctcccaggtaggatgagtgatgtaagagtctccagacccatatctggcgtgtgttgcatgggccccgcctcggcctggctggtttttatccatgatctcccctaatccccacagcctttgtaatgaggtggggagtgtcgccctcggtttcccaaggaggaaactgagactatggggaaagtcaccaggctgaggggagcgggggggcaggtctgtcttcagagccccgagggctggagcagccattcctgacccttccaggagggcttccccagctgtctcccaccctgtgggggtgcaccagcctttgttcttccccccagccttgttgaccagctcaggtttccgttcccagggtgtcgccctggaaacaaggtgtggctggcaggaggggccagggtgggagggtggcgtggggagtgggttcctccgccagccaggagtgggggccggggcgccggcagccatgagataccctcccagggaatgtggtccggccgccccaccctctgagagctggggggagctcccggagcagccctttcaggcagggagggcagacacccagcaaaccggttgttctgctcctggctggccacccaggccacccaccctcccaccgttagaaggttggcacctgggaccaggcagcctgtggtggccacaccctactgtgcttgagaagctcaagctccctgggagcttaaaacagttctgctggccgggcacagtggctcatgcctgtaatcccaggcatgccggggtgggaagatcacttgagccaggggttcaagaccagcctgggcaacatagtgagacctgatctctacaaaaagtaaaaattttaaaaattggccaagcatggtggtgcatacctgtggtcccatctgcttgggaggctgaggtgggaggattgtttgagcccaggaggtagaggctgcagtgagctgtgttcatgccactgcactccagcctgggtgacaaagtgagatcctgtttctaaaaaacaaaagaaaaagatagtcctgctgctaaccagcttagaaaccagctagctgggtgactagcagagtaggttaccctactttatcacacacagctagaaaacacatctgaatttgaatcccgggtggcttcaaagtcaagcgacaagcccagagtagctaactagctaagccactaagcaggtaattctctggctagtttagctagctaactttagatagcttggctagttagctctctggctggtttagctaagtggctaactagctctctagctatgtttaactgcttctgtgagtgttgagcccctcttgcctacatgatacccttgtgagctggatttgttcttaaactgttacagagtcctgaggccgggtgtgaaggttcacatctctaatcccagcactttgggaggccgaggtgggcagatcacttgaggtcaggagttcaagaccagcctgggcaacatagagagaccctgtgtctacaaaaaaatacaccaggtgcggtgactcaagcctgtaatcccggcactttgggaggctgtagtgggagaattagttgagcccaggaattcaagagcagcctgggcaacgtagtgagaccccgtctctactaaaaataagaaaaattagcctagtggattgacacacacttgtgatcccagctactctcgaggctgaggtgagaggattgctttagtctaggaggtggaggctgcagtgagccatgattgtaccactgcactccagcctgggtgacagagtaagaccctgtctcaaagaggggaaaaaaaaaaaagactaggcatggtcatgtcagcaggactgttatgtgtctattatcagtagaaaccgcaggtatgttcctgttgcatttcggttattgcagataccacaggcacccttccagagatagtccatgcatattcaaatgaatatataaaaatatataaaaagattcctcttccatcctttcttttttttttttttttttttttttgagacagagtctcgctctgttgcccaggctggagtgcagtggcgcaatcttggcttactgcaacctccgcctgccaggttcaaacaattcttctgcctcagcctcccaagtagctgggactacaggcatgtgtcaccacacctggctaattttttttgtacttttagtagagatggggtttcaccatgctggccaggctgggctcgaactcctgacctcgtgatccacccgtctcggcttcccaaagtgctgggattgcaggcgtgagccaccgtgcccggccctcctcttccatcctttctaatgcaaatggtagctcctcacgcagtcctcaactcacctccttttacttgatattgatttgaagacagtcccatgtctatacataagagctttgtaggaatgcatcgtatgaagatgcattcaggtcgtttctagtcttttgctgctacaaagagtgcctcaaccggtcacctcgcacatggtcatttcctgtgtgagtccaggcagccacaggctgtgacccaagtctggctggctgcaaaggccttgttctctctcaggacaaatcctcacccagacagtgcctttgtgcaatttggaaagattctttgctaccatcagcctgaaaatgctcataacaaacattcaaatctacattgttatggtgtagacataccatgtgcagatagatgcccttgtgcagtgcacggcctgctcagcagccccatgacgcctttcaggccgtgggcagccatctgagaccctctcccctctcacccactgcagacgtactccggccttttctgtgtggtcatcaacccgtacaagcagcttcccatctacacagaagccattgtggagatgtaccggggcaagaagcgccacgaggtgccaccccacgtgtacgcagtgaccgagggggcctatcggagcatgctgcagggtgagtgctgggtggggctgtaggccagcgaggcggctcttcaacgggggcctgacctggggctgccggaagccagagtccaggtcaaatgacagcttgtagacttgactctgtagggcttcttagggggctggagggagcacaagtagaggcctgagtgggtgaggtgctaggtcctagagtctttttacctgtctccatgttcattgtctcttttattattgttattattattattagtttgagacggagtcttgctccgtcacccaggctggagtgcagtggcatgatcttggctcactgcaacctctgcctcctgggctcaagcgattctcgtgcctcagcctcccaagtggctgggactacaggcgtgcaccactgcgcctggctaagagatggggtttcaccatgttggccaggctggtctcaaactcctgacctcaagtgatctgcccacctcggccttccaaagttctgggattacaggcataagccaccatgcctggcctctttttaaatttttaaataaattaatttatttttggccaggcgcggtggctcacgcctgtaatcccagcactttgggaggctgaggcaggcggatcacgaggtcaggagatcgagaccattctggctaacacggtgaaaccccgtctctactaaaaatacaaaaagaattagccgggcctggtggcgggcacctgtagtcccagctactcgggaggctgaggcaggagaatggcgtgaacccgggaggcggagcttgcagtgagccgagatcgcgccactgcactccagcctgggagacacagggagactctgtctcaaaaaaaaaattaatttattttttatttcaatagtttttgggaaacaggcggggtttggttgcatggaaaagttctttggtggcgatttctgagattttggtgcacttgccatcggagcagtgtacactgcacccaatgtgtaatctatccctcaccaccccccactacccttcaccctgagtccccaaagtcagttgtgtcattcttatgtttttgcatcctcagaacttagctcccacttacaagtgagaacatacgatgtttgattttccattcccgagttacctcacttacaataatggtctccaatttcatccaggttgctgtgaatgccattatttcattcccttttatggctgagtagtattccatggtgtatgtgtgtctatatatcccatggtgtgtatatatatattttttatatatacacaccatgggatatatactctctctctctatatatatatatatgagtattccatggtgtgtatacactcacacacacaccatgggatatatatgtgtgtgtgtgtatacacaccatggaatacatatatatatgtatcacagtttatctactcgttggttgatgggcatttagtctggttccatatttttgcaattgtgaattgtgctgctataaacatgtgtgtgcaagtgtctttttcatataatagcttcttttcctctgggtggataccccagagtagggttgctggatcaaatgatatatctacttttggttctttaagtaatctccatactgttttccataattaaaaaatcaaaaaataacatgttggtgtggatacggtgaaatgggaacacttttacactgctggtggaatgtaaactagtacaaccactattgaaaacagtatggagattctttaaagatctttgttccctctttctccgaacaatattggttgggtgtggggcttttacgaacatttcccttgagacagtaattcccagagtgttcattcatttattcaacatttatcgttgaattgtagatctgatctccattgtcacggggtaaatgtagccccttagacagatggcaggtcaaggcagttgtgtacagctgagcaggttgtacactgaacaagggtatccatccaaggggctgccattcataccatgacaacatagatcagtcctggcagaattacatgattaacatctattatagatataatgcccttattatatatttgctatatatcatctattttcatagatatttagtattttttgtttatatctattaaacatttaaaaattatatctatttacatcatataacatataataggccaggggcggtggctcacacctgtaatcccagcactttgggaggccaaggcaggagaattgcttgagttcaggagctcaagaccagcctgggcaacataacaagaccctgtctctacaaaaaaatttaacaagtttttgttaaaaaaggaaaaaccccatgtaatagtacacaacattcagacccttcgatcatggcttcgaaacccatcggtgccgctcgccatttccgtcccgcaccccagcctcacccaccttcctgtctgtcaaacatccctaagtcagtcctacctcagggcctgaatatgaatatattatacttattgaatatgcatattaaatatgagcaaattattaaatttatatatttgattaaatagtataatattgtgaatatattatgcttatttaatatgcatattcaataagtattttattttattatactttatttttattatacttcatttttattttattatactttatatttattttattattatataaatgtaatgttgatttaataaattatacctattaatatgcatattcaataagtataatgtgttaaattaaatagtataacatattaaattaaatggtatattaaatagcataatattgtaaacatattatgcttatttttttttttgagacagagtctcactctgtcacccaagctggagtgcagtggcatgaccttagctcgctgcaacctcctcccgggttcaagccattgtcctgcctcagcctcccgagtggctgggactacaggcacatgccaccatgcacagctaatttttgtatttttagtagagaccaggtttcaccatgttggccgggctggtctcgaactcctgacctcaggtgatccgcctacctcagcctcccaaagtgctgggattacaggcatgagccaccatgcccggcctaatatgcttatttaatatgcatattaaatgggagtatcaaatgggaatactgaagtctccaggtagaatagtggattcatctatttctcctggcaggtctatcagtttctgctggattaattcatttaacctcgtagcaaatctatgaaataggttatctccttgtccctgatttctgggtggggaaactgaggcacagagcaaaacagtcatggtcacactggtgggtgtatgctgaggtgggattcgaacccagggcccctgaccaccgcctccctgtatgtcacactgtgtgttatatttcctcctgtgccgtgcactgtgctgagtgcattttgagcattctgagttctgactacagccctgggagatggcagctgttttgagccccatttttcagatgggaaaacagaggcacaaagcaactcagagactggcccaaggtcacgcagcaagtcagagaggcagccgggcggtgaacctgtgtgcatatagtcccccataccaggctgccaagtctgaggtcctactggacgcagcttactccctggcttgaagacacccagaggatgcctgtcctgcttaaaaaaacattcagaccctttgatcatggctttatttatttaaatttatttatttagagacggagcctcactcttgtcacccaggctggagtgcaatggcacgatcttggctcactgcaacctccgcctcccgggttcaagtgattcttctgcctcagcctcctgagtagctggggattataggtggcgccaccatgcctggctaatttttgtatttttagtagagatggggtttcaccatgttgcccaggctggtcttgaactcctgacttcgggtgatctgctggcctcggcctcccaaagtgctgggattacaggtatgagccactgtgtccagcctaatcgctgctttaaaacccatcccaccactcgccatctctgccctatcccccaacctcactggcctttctgtctctcaaacatttctaactcagagcctttcccctggctgtgccctctgcctgaaatgccacctccactgagaagccttccctgctccttcccccaagtcaattcttattacctaacaccagggttttggaatcctggctctactgacatttggggctggatgattctttgtcgtgggaggctgtcctggtcattgtaggatgtttagtagcaccccggcctctacccactcagtgcccatggagctctcctctctcagggtaataaccaaaaatgtctcccagacattgccaggtgtctcctggcgggaatggaggacataattacccccgtttaagaaccactgcttcggccgggtgcagtggctcatacctgtaatcccagcactttgggaggccgaggccggtggatcacgaggtcaggagatcgagaccatcctggctaacacagtgaaaccctgtctctacttaaaatacaaaaaattagctgggcgtggtggtgggcgcctctagtcccaggtacttgggaggttgaggcaggagaatggcgtgaacccgagaggcagagcttgcagtgagccgagattgcgccactgtactccagcctgggcgacagagcaagactccgtctcaaaaaaaaaaaaaaaaaaaaagaaccactgctttattctagtactgattcaattttcttcccagtgctgatcggtatttgattgtaggtttctgtcccctacatcttaagtggaagctctgtaggggcacacaccctgccagttccccactcccctccatgcctggcgctcagtaggtggtcagcatgtgattgtggaatggctgtgttaggcccagggcaggcgctggggtagacatcttatattacaggacctcgcttctgtctttgaatctcacatgcccagcatgaggcagcacacagtagggtctcacgttgaggtcgttgaatgaatcatattctcttcagttgagggaggctgtctccattttacgggtgaggaaaccaaggctcagagagggacagctgctttcccagggtcacacagcgagcagggggctgagctgggtggggaattagaatccaggattgttacacatcaagacccaagcttttccttactccctgggaataatttttaaaatgcagcggccagtgtaagggaccagagggccctgctagagactctctcagatgacatattcccccactctgtcccctacagatcgtgaggaccagtccattctctgcacgtgagtaatctggaaggacttcctggaggaggagaggtctgggtggggcgtggctgtgtttggaatgggcagggcaggtggggagcttgcctgaggtcattgccaacccctttgcttccccttgtcatccccacagtggagagtctggagctgggaagacggaaaacaccaagaaggtcatccagtacctcgcccacgtggcgtcgtctccaaagggcaggaaggagccgggtgtccccgtaagcaaccccgccttgggtcacccccgggccctgccacagcactgccccttccatcttgggctttccccacaattgtctcttcccctcatggaggtccttctcctagacgcctatgccacctgagcacctactgtgtgcctggggtggggctggaagcagagtcagggggacacagaggtgtgagggtcagtcttggtctcactggctctcggaatggctcctagtacttagtaggtgctttcttttctgagcacctactgtgtcaagcctgattttaggtgatcatgatgcctgggtttgtcgtctaagtgaatgttatatggtgccctccactgttccaagccctgttctcacactgccttacttacccctcgggtggggtgggtgctgttttcctgcactgaagacggagagcccaggcatgggaggggtgagtcagttgttggtcatgcaccgaggaagaggtacagtgaggccgggcacagtggctcatgcctgtaatcccagcagtttgggaggccgaggcaggaggatcgcttgagcccaggaattcaagaccagcctgggtaatatagtgggaccccatcgctacaaaaaacatttttgaataaaggaggtagagtgggattcaaacccaggagtgtggtcctccaggccaccctactccacatgcccggtttccccagtcccccttcccccaccccccatgccaccacctgagatcactggttcacctgtgtgtctgtccacgttccatgtgctgtgtcctggtccgtgtctcgtgtcccgtgacttcctcaggcctccgtcagcaccgtgtcttatgtgagtagcaggggatcacctcgagtcttgctgcccctaatgccttcccggccacccaatgcatgatcttcttggtagacagggcccaaggcagcagtggtcccacctgccagggacccctctgccccaccactgctattcatggcggccctgctgtgtgagtgtgtgcagatgggccacagacaccaacatgaaacaatccagagaacaaaactgccacttactgctgatctactaaatgtgtccagccagggcccacagatgctgcgtgcacacaaccagagtgaacagtgtagcaagggaaatacacgcatgtcccatgttcttctgtgtgccaagtcatgtgcccttcactttgtgtatcttttcatttgacaaagcatccacctagctagatcatttcatcttaacacaagcaagacatggactgagagaagacataaacaggctgccatttatgaagcacctactgtgtgccaggctctgacaccaagggggctggagggaagtttggagtagagttcctgccaaggagtagcctggtggggctaggaacccactattttttgaaggcctattatatgccagactgcttgaagcactttacataggtggtacagatttttgccttacttaaaaattctaggctgggtttggtggctcaggtctataatcccagcactttggaaggctgaagtgggaggattgcttgaggccaggagttcaagaccaggctaggcaaaagagtgagaccccatctctactaaaaattttaaaaagtagctgggcatggtggtgcttgcctgtagtcccagctactcaggaggctgaggtgagaggattccttgagcccaggaatttgaggctgctatgagttatgaccatgccactgcactccagaatttctacaagcaacacatgagtacatattcattgtaacaacaacaaatcagatgaaatgaaattcctgtttcctcccctcagtccccttccttggagtgccttacactgttgacagtttggtgtgcatccttgcagacctttctccatatgtttacaaacatgtatatatctgtagatttaagagtcctgttttgtggcgtttcttccttaattcatttcttattaatgggataacattgtagacattgttctgcaacttgtttttttgtttggcttggtttggtttggtttccacttaacaacatgtcttggagatgcttccctcttcccctcacaatagacagatgggcaagacccggatatgggaagtgggtacacgcccagacacacaaaggcccctcacacacagatactcagtcagctggagacacagcccgagctgggctggcctggcctcctgccccattctcactgacctcatgcatcatctcctgtgcccggcagggtgagctggagcggcagctgcttcaggccaaccccatcctagaggcctttggcaatgccaagacagtgaagaatgacaactcctcccgattcgtgagtgccaggggtgggcagtgctggctgtgtcagggatacaggagctgggaacctcagggtgggcttcagggggaaagacacgtggatctgttgagggaggaggggctgggggtctggactcttgagtctgagggaggaggggctgggggcctggacccctgggtctgagggaggaggggctgggggcctggactcttgagtctgagggaggaggggctgggggcctgaacctctgggtctgagggaggaggggctggggccctggattcttgagtctgagggaggaggggctggggacctggactcttgagtctgggggaggaggggctgggggcctggacccctgggtctgagggaggaggggctgggagccccagacccctgggtctgagggaggaggggctgggggcctggacttttgagtctgagggaggaggggctggggacctggacccctgggtctgagggaggaggggctgggggcctggacttttgagtctgagggaggaggggctgggggcctgaacctctgggtctgagggaggaggggctggggccctggattcttgagtctgagggaggaggggctggggacctggactcttgagtctgggggaggaggggctgggggcctggacccctgggtctgagggaggaggggctgggagccccagacccctgggtctgagggaggaggggctgggggcctggacttttgagtctgagggaggaggggctgggggcctggacccctgggtctgagggaggaggggctgggggcctggacttttgagtctgagggaggaggggctggtggcctggacccctgggtctgaaggaggaggggctgggggcccagatccctgggtctgaaggaggaggggctggggccctggactcttgagtctgagggatgagggagtgcaggcccggatccctgggtctgagggaggaggggctggaggctgcgtgcctagttccaagggaggagcagctggggaccagggggctggggaaagaagtccaaggggcccggaccttgaattcccaaggagccccccgatggggactcaccacaggatggggttcaggtagagggagcaaggaagtgggggggcagccgcagctctgggagcagtgggtgtggggtttgggctgttgttcacgtgtgagtggggaaggggaccctctgctgaagcccacccactttggtctctcccagggcaaattcatccgcatcaactttgatgttgccgggtacatcgtgggcgccaacattgagacctgtatcctctcacagcccatgggggtggcagccaaggggggcagcctttcagacagcactgagtatggaaagcacctcccactgcagggaccccttacctgctactcagatgggacctgatgctcaggcggcatctgcatggggaggggagggtgggacttctggtgtgtatgaggccagcacagcctcgctatggggtggtgggttggggtccacccagttcagccataaggggagtcccagcacttagcctgcagtggcactcatggtgacccatgacagtgaaatgacatagagcagtataagcaaagggaaaaggcacgtggggccaagtccccagggaccaggcacaagctcctagaaccctctccagcagaggcacacaggacaccaggtgcgacaacacttatgaaatgctgtcccggggaagcacagagagactcactaccagggttttcactggtggctggccacatccccgcctgcaccccccgtcccccgcccttagtatgaaccaaaattccacactcccgggaggaaagcaggtgatcagtgtaaaccacagtgtttgcacaaaccctttaggtctagcgaacccctcatcctgttagaggatgctggaaccctcccgaaatccaggtgcccagacgctagccaggggcccacctggccagcaggcctttccaggggagcatctcaggacggctgttttctgctcagatggcatatgggcgtttaaaggaaattaaacaataaaacacaggcactctgggagtgcagaaattaagagaatgggccaagaaatcgtaccaacctgggttcaaatcccagttctgccactttgagactctggggacttgggtacgtgacttggcctttccctgcctcagtttctccctctgtagaaggagaaggaacatagaacctacccaagaggggtttggaggattttggagttaaatgcttggccacagcacctgctacatagcaggcactcaagaacaagctattattagcaattaatgattaaattagtggccaggcacggtggctcatgcttgtaatcccagcactttgggaggccaaggccggtggatcatttgaagccaggagtttgagaccagccaggccaacatggtgaaaccctgtctctaataaaaatacaaaaaaattagccgggcgtggtggcgcatgcttgtagtcccagctactatggaggctgaggcaggagaattgcttgaacctgggaggcagaggttgcagtgagccgagatcacgccactgcactccaacctgggtgacagagcgagactctgtgtcaaaaaaaaaaaaaaggttaaattagcaatatctgtatcaatgctaatattattgactaatattgattgataattactaatcaataacattaacaactgctaataagccacatccccatcccagaggcatctgataagctcacgctcttccataatcagtggggaggggtttctcctaagtctgctcagggcatgaagcagccagccggcccgttggttctgctgccttgtgggagatgcttcctgggctgtcaccaccccaagtccccagcagcaccgcagcccctgctcctgccgttttctgctcatggctgctccttcctccaggtcctcttgcccttggctcccacctctccatggtacctgcatatccaggttcttggagctcatggctcttcctgccaaactgtcctggcacttgtgtgtctctgcttatattcatatttgccttctctgtccgcttccacctgctcactttctcctgtccacgctccccatgcagtgtggctgcccctcctgggcacagctgtggtcccggctgtctcaggcaccagtggattgatgctcatgaatcaggtcccgcccccaggccaatcgtatgagtcttgggatggcctgccgggtaaggagcaccaccctgtgtggctgacccctcggcactagcatcagtgccatcgtgaccagcttttctggagtgctgactgtgtgcccaccgccacctcgagagtccccatgatatctcagttcctcctctctgcaaccctgcgaggtggctgctgctatcacccccgcttcacagaggaggaaaccgaagctcagggctgttgtcccccagggttcgacagcctgcgtgtgctccctgccttccagctttccttgtgggagcccctccacctgtttctccccatctaaccaagcaggttacaccccagggcttctgggaaatggacctcaggtttgcagctgatcttggtccaaatatgtatttggtggtgcatgagtgtggtggtgcatgagggacacagaggggttaagcaaagtgtatggtgttttggtgttttgttttactctaagatgttttggctgggcgcagtggctcatgcctgtaatcccagcactttgggaggctaaggctggaggatcacttgagctcaggaattcgaggccagtcagacctcctctctactaaaataaagaaaatttaaaaattagccaggtgtggttgtgcacacctgtagtcccagctacttgaggctgaggtgggagtattgcttgagctggggaggcggaggttacagtgagctgtgattgtgctgctgtgctccagctgaggcaacagagccagaccctgtctaaaaaaacaaaacaaaacaaaacaaaacaaacaaaagtcttgccaccttttaatatgtaagtttgacacgtgactttcttgggagggagagcatgcagagtgacagtctagttgaaggtgggagctgattatctgcatggggaagctgaggctgggagagtactaatggcaggagacattctcacctgcgggtaactttgaaccaggcattgttcagggtgcttcatgcacaataagtcatttatcttcacagcaactcatccagggtcgatgaggtttctttgttttgtttttgtgacagagtctcactctgtcgcccaggctggagtgcagtggcgcaatctcggctcactgcaacctcctcctcccgggttcaagcgattctcctgcctcagcctcccaagcagctgagattacaggcacccgcgatcacacctataatttttgtatttttagtagagatgggattttgccatgttggccaggctggtcttgaactcctgacctcaggtgatccgcctgccttggctttccaaagtgttgggattacaggcgtgagccactgcgcccacagggttgatgagttttttagagacagagcaagaccctgtctctaaaaagagagagagagagagaggaaggtctcctaaaggtgttattttcaagccccttgaacaggtagatgaggaaactgaggcacaagtgcttaagtgacatgagcacggctgctcttccagttagtggcaaagtcaccagcctgggctgtgagcgactccactacaccacaggagagaagggggcagcgtgggcagggcaggctcctgtagtggcctggcagcgtcggggccgtcccttcccctctagcaccttgactcgctgtgtccagacctgctggagaagtcgcgggccatccgccaggccaaggacgagtgcagcttccacatcttctaccagctgctggggggcgctggagagcagctcaaaggtcagtgccgccccgtcctaccctgctcacccgggagagggtgggcaccatgtctctcgggggccccttctggggaggaagcaagagtggggggctctaatatccgtcaaacaccgacttcgcatgaggctcccgcagcccctgctctcgctgcgtagtggcgtctgtcgcacggtgggttctgctgcgctctggttccagctctgtcccgggtctggctcgcgcccgctgtcacggccacgcagcccccgccgcctggtggctcctgctcacgctcgcttccgaagctccgtggcttctctctcgcgcggcttctcctcactccggcgggtgactccggctttgctgaggctcctcctggttcctgacgacgctggtttgtgttgcttctcggctcgtgctgcctcgtgctcccctctgctctggctcctaggccacggctcttgccggagtcctcctgtccctgctccctgttcctcctgccctctggctgcccaagcgcccttggctcctgtttgcagtggctggcactgccctgtagctccctctgctcctggctccttcctcctggtggctcaggccgcttcctggctcctgcggccacatagcccctcctcatccaggttcccactcactgtggcctttgagaccgcatgtccttgggcgccggcccctgccatcccatggcctgtgctgacttgggcctgcagccccactgcttctgccaaccagtggcccctgcctgctctgggcacttctagagactcaaaagtccctgcggagggagcaaagaggagtggtatacactgcgtggggactcatgcctgcaatcccagtactttgggagggtgaggcaggaggattgcttgagcccaggaatttgagtccagcctgggcagcatagtgagacccccatctctgtaaataataacaataataataagctgggcatggtggcacacagctgtagtcccagctatgtgggaggctgaggtgggaggattgcttgagcccaggagtttgaggctgtggtgagccatgattgcatcactgcactgcagcctgggcaacagagcaagaccctgtctctaaaaaattaaaaaaaaaaaatagagacagagtggtggtctcataggtgctaaacgcccactccacccccgacccttcccaccacacttgtgagtaaaggcccccacccacttgacagtgaggatatggcatgtcctgggattgccaccgatgaatccaggatgagtctgactgcacagcccacctttgaccttgaccccactcattgtccctgcagccgacctcctcctcgagccctgctcccactaccggttcctgaccaacgggccgtcatcctctcccggccaggagcgggaactcttccaggagacgctggagtcgctgcgggtcctgggattcagccacgaggaaatcatctgtgagtgagccccgtggaggccaggggtaggggggaaccccacggagagctggggacctggccattcatgccccgatctctttgagcaagtgtttattgagcacctactgggtgcaggcaccggggccagagcagggaatgaggctcacagacatctctgccttgaggaagctgacaaaatgagagcccccaaccaagtcaataaggaatcacatggcctgttagtagactatgagtgcagctgggcgcagtggctcatgcctgtaatcccagcactttgggagtcccaggcaggtggatcatttgaggtcaggagttcaagaccagcctggccaatatggtgaaacaccgtttctactgaaaatacaaaaaagttagccaggcgtggtggtgggcacctgtaatcccagctactcaggaggcttaggcaggagaatagtttgaacccaggaggcggaggttgcagtgagctgagatcgcaccactgcactgcagcctggtcaacagagcgagactctgtctcaaaaaaaaaaaaaaaaaaaaaaacaaaaagaccatgagtgccatggagaaagatgggggagggaggggcacagctttaagcaggggctcaggggagggtggactgagatggggatgtttgaacgaagtcctgaggaagtgagggaatgagcactggagatgtgggggaagagcattcctggcagagggaacagcctgtgcaaaggccctgaggcaggaaaggggtggcatatttgagggattgacacttctggtggtggagctgcagaggggtggggagtctcaaacgccagcctaggaggttgggactttgtcctggggtgctggggagctgtgggagggctgggagcaggggttggacaaattcagctctgggagcaagaagaccccttgggggccgtgtgagagacacactggagtgggtggtgctgagaccagaaggaggctgctgaggctctagggaaggctcaggacgctgtcccagggctgctcaggttggcccaggctgcgcggcactggttatttggtgttaaatgctcagctcatcacccccgtgtcagggtgctgtgcccacccccacttttttttttcttttgagagggagtctcactctgttacccaggctggaatgcagtggtgtgatctcagcccactgcaacctctgcctcctgtgttcaagtaattctcctgcctcagcctcccgagtaactgggattacaggcgcccgccacctcgcctggataatttttgtatttttagtagacatggggtttcaccatgttggccaggctggtctcgaacccctgacatcaggtgatccaccctcctcggcctctcaaagtgctgggattccaggcgtgagccgctgcgcccagcctgtgcccccacttttttcaccaaacagcatgttttgacagcagctctgtctcagtgctgcattagtttgcttaggctaacaaagtaccacaaacctagtgcctaaaacaacagaaattgattgtcttgtggttctggaggccagacgcccgggatcgtggtgttagtgagggtggttcatcccgggagaatcggctgcaggtctctccctaggctcctggtggttttctggcaatcttcggcgttccctggctcatagtcgcatcacccgatctctgcttttgtgttcacatggcggctccctgtgtgtgcatctgtgtccaaaattccccctcccccctccccccgacccccccgccccaacctttttgtttttttgagacggagtcttgctggagtgcaagtggtgcaatctcggctcactgcaacctccacctcccgggttcaagcgattctcctgcctcagcctcccaagtagttgggatcacaggcgtgtgtgccaccacacccggctaatttttttgtacttttagtagagacagggtttcactaagttggccaggctggtctcgaactgctgacttcaagtgatcctcccgcctccgcctcccaaagtgctgggattacaggcatgagccaccgcacctggcctcctaccctacactggtatgattttatcttaactcgttacatccgtaatgaccctgtttccaatactgtcacattctgaggtcctggggtttagatccccaacatgctttttaggagggggtggtgtagacatgattcaacccgtaacaagtacgtaggtggacctccgccttttcagaggctgcgtaatgtttcattgtttgcgtgaactatgattcttttaaccaagccctccaaagaaagacctttaggtgtttctgggctgagccagggccgcctctgggtctgattgtcttctggtctctggcgctgtgggaggccccaggagctattgttggctccagggccggattggaagtgctggaaatggagcgtagcttggctgtctacccaggctgcaaacagccgggcctcttgtggcctattgacacagggtcttgggcctctcccacccccaccccgccgcatttcccaaccagggttgcataattccccagcctgcatgactccgcagctgggcagctggcacacaaattcagactgtggctgcaatggggacctgggcctcccagcctgtcctcttaggtcctgcctggcctcttgtcaccatgagctcatgtgaccctcctggcagctgccctgctgtgtggcaggcgcaggcagcagctctgatttttggaattcagaaataaaaactttgcagcaacctatgcatgtagtaacataaactgaatgtggctaaaggttgtactgacaaaaccaagccttcccactcttccctggccctagtttcccactgttgagcttcttgtatctccttccagaaatattttaagaatataagaaaagacacatattatttgtctataggaggaggcattctctaaccccacagctgatgttcagctgtcaacatcactgtggtgataaaaaaaatgtgaagcaatttctctattggttcaaaagttccggccaagtgcagtggctcacgcctgtaatcccaacagtttgggaggccgactgaggtcaggagttcgagaccagcctggccaacatggtgaaaccccgtctctactaaaaatacaaaaattagccagacatggtggtgggcgcctgtagtcccagctactcaggaggctgaggctagagaattgcttgaacctgggaggcagaggttgcagtgagccaagatctcaccactgcactccagcttggagcagagcgagactccatccaaaaaaaaaaaaaaaagttcctggatgttggttgctccagctggccccccagctccctacccttccactagagacccccctggaccctggcccagcactctggcctaggttagtctgggccaggcagtgctagagttaaatactcagcttgtcattggctcactcctgtaatcctaacactttgggaggccgaggtgggagaatcacttgaggccaggagtttgagaccagcctgggcaatatggtgagaccctgtctctactaaaaattaaaaaaaaaaaaaattaaccaggtgtggtggtgcaaatctgtagtcccagctacttgggaggctgaggtgggaggattaagtccaggagtaggagactacagtgagctatgattgcaccactgtactccaggctggtgatagaatgagaccccatctcaaaacaccccaaaacaaagaaacaaattactcagctcatcattcccatggaaggatgctctggaccccctctccactgccctttcctacagactggtatattttggccatagttgtggttcaaaatagatggacctcattcctttttgcagctgcgtaaggttttattgtttaaataaactatgattctttcagccaatcccttgcagatagagccttaggttgtttccattccattactattggaacaattaaaaaaaaaaatgctaagccagcgcagtggctcacgcctgtaatcccagcactttcagaggccaaagcaggcagcttgcttgagctcaggagtttgagaccagcctgggcaacatgatgcaacctcgtctttacaaaaaacacaaaaaattacctgggcgtggtggtgtgcgcctttactcccagctatttggggggctgaggtgggaggatctcttgagcccgggaggtggaggctgcagtgaaccgagatcatgccactgcactccagcctgggcgacaaagtgagactctgggtcaaaaagaaacaagctaccgtgaatatccttgtaaacaggttcttgtgctcttgtggaaacagacctgtaggttcaattcttagaaacgaaatgccagctgggcgcggtggctcacacctgtaatcccagcactttgggaggccgaggcaggcggatcatgaggtcagaagtttgagaccagtctgaccaacatggtgaaaccctgtctctactaaaaatacaaaaattagctgggcgtggtggcacatgcctgtaatcccagctactcgggaggttgaggcaggagaatcgcttgaacccgggaggcggaggttgcagtgagccaagattaagccactgcactccagcctgggtgtcagagcaagactccatctcaaaaaaaaagaaaaaaaagaaatgaaatgccatttccaaggagacttgtgattcttgtttgcgttcagcattaaaaaaatcgaacagctttaagatataattcacgtcacaccattcacctatttaaactgtgcaattccatagcattttgtgtattcatagagttgtgcacctatcatacagtcacttttagaacattttcagtagcccaagaagataacgcataccctttagctgtccccccaggccctgtccacagcctctggcaaccactcttctgctttcggtctctatggacttgcgtattctggacatttcatagcagtgaaatcatgccgtatatgatcctttgtgactggctgctttctcttggcatcattttcaagtttcatccacattgtagcatgcagtaggtttccttcctttttattgctgaataatttttattgttatcttcttatcatggaaaatttcaaacatgtatgcaaacagagtgcagaatgtaatgaatgccccaccaccaccagctggcagctgtcaccagctccatcaatgatgaaccggtgacctcttgtgtttcatctctccccaacctccctaccccaactcaggtgtgaacatttttttttttttttgagacagagtctcgttctgtcacctggggttggagtgcagtggcacgatctcgactcactgcaacttccacctcccgggttcaaacaattctcctacctcagcctcctgagtagctgggattacaggcatgtgccaccacacccgctaactttttttgtatttttagtagaggcagggtttcaccgtgttggccaggctggtctcgaactcctgacctcaagtgatccacccgcctccgcctcccaaaatgctgggattacaggcgtgagccaccgcacccggccatgagcattttttaaattgcagagaatctacctcgtcgctgtccacagggtggcgctagtttccagttcctccagcatatacctggagcacctgtgtccccacctgcacccagcaacgatggctggagcttttttgtctttgctgatgtggcagatgaatgagctctcattacagtttcattctgtgttttgcttacaaggagtggagttagtcaccttttcacagactttttttgacaagagacagagggtcagggaggtggggtgtcctgtcctaggactcaccccaattcaagaggaggaggcaaagccatggtggaaacgtctgaccccaaagccagcccatgatccagagagagaggtggacacctcagtgtcacccacagggagcccaaggcagaaagcatttggggccaatcaaggcagggtgtctgtccatctccttccccattttacatctctgcctgccaccccttggcaccataaatgccatgctgagaggttgagcaggtagcctgggacacagggaggcatgccagcctctcacatgaggcatccgcaggctgggcttgctagtgatgggcgagtctgatgtcagcaacaagagctgactgccaggtcctcagggcatcagatgcgccctggggcctggcacaaacacagcttcctaagccaactgcaagaggccattttaaaggccattgatggaagccaggtctggacggggtctaagctgatgttaaggaatgatcattaagtttgctgggccagatgcactgtgggtctgtaaggatgtgtccttctttatttatcttttttattttttattttttttgagatggagtctagcgctctgttgcccaggctggagcagagtgcggtggtgtgatctcagcttactccaacctccacctccctggttcaagcaattctcccatttcagcctcccgagcagctgagattataggcgctcgccaccacacccagcttatattttgcatttttggtagagtcggggttcaccatgttggccaggctggtctcgaactcctgacctcaagtgatccccttgccttggcctcccaaagtgctgggattacaggtgtgagccaccacgactggcctaggatccttcatttaatcacatctgcaaagtcccttttgccatggaaggtcacattcacaggtcccagggattaggttatgggtatctttggggtctgttattcatcctcccacctcctctgaaaacatcagcatgtatttcctacgaacattcctttatacaaccacagaccagcagtgtcaccaggaaatcgagttcagcacagcactgttatccagtccacagaccttaggccagttgtcccccaacctccaaaaaaaaacaaaaaaaattctctcttgcgcatgatggagtctcactctgtcccccaggctggagtacagtggcgcgatctcagctcactgcaacctccgccccccagattcaagcaattctcctgcctcagcctcctgagtagctggaattacaggcatgcgccgccacacccagctgattttgtatttttagcagagacggggtttctccatgttggtcaggctggtctcgaactcctgacctcaggtgaaccgcctgcctcggcctcccgaagtgctgcgattacaggcgtgagccaccgtgcccagccctcttgctctctttttttcctggtcatccatctctttactctccttcagtctgaaactcttcctgagtctttctttatcattcatggttttgacacttgggaagattacagactggttgtttcatctgtatctgggtctgtttccctgcaattacattctagttacacgtttttggcgggagtattccagaagaaatgctgacctcccacccccactcacacacacctttttctttttcttctttttttgagacagtgtctcactctgtcacccaggttggagtgcagtggcccgatctccgctcactgcaagctccgcctccccggttcatgccattctcctgcctcagcctccagagtagctgggactacaggtgcctgccaccacgcctagctaattttttgtatttttagtagagacaaggtttcactgtgttagccaggatggtctcgatctcttgacctcgtgatctgcccgcctcagcctcccaaagtgctgggattacaggcgtgagccaccgcgcccggccacacacacctttttctaagccacctttgtgtagaagtacagtatacacaccaataaaaggagcacaggcccttggcatccagcctgggggagttttgggagggaacaccctgtatatccagcacccaggagccccccatgtcccttcccaccaccagcaccccctcaaggtaaccattattccgacttctaagagcatggagttgtgttgcctcttcttggatttggtacaaatagaatcacacggtgtgcagtttctcacctggcttctgtcactcagccgtgtgtttgtgacattcatccatgtccagtgagggaagggggctttggagaggccagttccacagacacattcactttgtaaacgttcctggagctggatgtctatagtatgtgtccttttctgtatgtgtgctgcgcatatgtatttacattcataaacctatgctacgccggcacggtggcttatgcctgtaatcccagcactttgggaggctgagttaggagaatcgcttgagccggggaatttgagaccaacttgggcaacatgccaagatcccatctggacaaaacatttttttaaattagctgggcatggtggtgagcatctgtagtccagctactcagaaggctgtggtgagaggatcgcttgagcccaggaagttgaggctgcagtaagctatgatcacaccacaccactgcactccagcctgggcaacagagcaagactctgtctctttaaaaaaaaatctatgctaaaatgaaaaaggaaaatggaagcacagaaattaaaagcactgcctcccaggccaggcacagtggctcatgcctgtaatcccaacactttgggaggccaagtgaggaggacttcttgaggccaggagttggagaccagcctgggcaacagaatgagatctcatctctattaaaaaaataaaataaaataaaaaaataaaaacagaaaaacaaacaaaaaaacccaaaaaaacaaccacagactgccctggtttgaatcccagctctgccagcctatgtgagctgggtgatcttgggtgagttgattgagtgcctcagttaccctatctgtaacatgggaagcatagaaggacctgccttgttcagtggttatgaagggtacctgaagtcatttgtaagtgtttggaacaggttgtggtatggaggaagtgaaaaataaatcaaggtccatttcagtgcacaaatggtacaaactgttctagaatgaatggttgaccaggcggctgaggggttgcactgacctatggccccaccatgaaagcatcagatgcagccaggcttggtgactcatgcctgtaatcccagcactttaggaggcccaggcgggcggatcacgaggtcaagagattgagaccatcctggccaacacgatgaaaccccgtctctactaaaaatacaaaaattagctgggcgtgttggcatgtgcctgtagtcccagctacttgggaggctgaggcgggagaatcacttgaacccaggaggcagaggttgaagtgagccaagattgtgccactgcactccagcctgatgacacagcaagactctatctcaaaagaaaaaaaaaagaaaaagcatcagatgcaaacacaaacacagcctcacctgctgtccccttgactcaaacaccacacacagctctgctgtcaggggagagtgttctgaaaaggtgatcaattttgattgagtcctgagcaaagcaaagaacagccttctctgggatttacacagtggctgtcctcctggaaaattcactgtatattaattttttttttttttgaggcagggtctctctctcattgcccaggcttgagtgcagtggtgcaatcatggctcactgcagcctcgactttccaggctcaggtgatcctcctacctcagcctcccgagtagctgggaccacaggcatccaccaccatggccacctaattttttgtatttttagtagagacaggttttcactatgttgcccaagctgatctcaaactcctggactcaaatgatcttcccgcctttgccctcccaaagtgctgggattacgggcgtgagcccgtaccaccaccaccacaccgcaccaagcctcactgtgtattaaaaccaagcacaaaacactgctgtatttatacgtaaaactgttgggaatttgttgcagataattacaaaccatgacttcatggacgcaaatgtccagggggccatttttcagaagccatgtgggctgtagaaaccgtccgcatccaagtggactgcctagtcctggtgacgtccagaaacacccgacccctccacaagttcctgagacatattctagggggcagcactacccacttccaatgcactttctagaactctgcacagcctactcgccaaatctatttgtaacccccaattcaaggtccatttctgtattagtcatgctgctgataaagacatacccaagactgggtaatttataaagtaaaagaggtttaacagactcacagttccacgtggctggggtggcctccacaatcatggcagaaggcaaaaggcacatcttacatggtggcaggcaagacagaatgagagccaagcaaaaggggtttccacttataaaacctcagatctcgtgagacttattcactaccacgagaacagtatgggggaaacagcccccaagattcagttacctcccactgggtccctcgcacaacacatgggaattatgggagctacaatttcaagatgagatttggctggggacacagccaaaccatatcaatttcgatccacaaatcgtgaaaactgttctacaatgaacagctgatgatgtggctgagggattgcattggtgcatagcatcaccatgaaatcagtactcctggtgtgttcgtggtcatttacggtcctgcgtagaatggaggaaaatttgagtcaccgagtgcacactcagctcacatcagacaggggtggtgttctgccttctggtttcagttctcatactgtacagtgtcctttcctaaatagtgccatgttagtcacaaatttgcactttttgctggtgattgcactgtctcaaatgtcccctgagcacagtgctgatgtgctgtctggcatccccaaacacaagaaggctgccatgtggctttggagaaatgataaaatacgtgtgtgagatcagcttcctccaggtgcgagttacggtgctgttggcctcgagttctgtgcgaatgagtcagtagtatattaaataaggtgtctctaaaacaaaatgcacataaaacaaggtgacgaggctgggtgcagtggctcacacctgtaatctcagcactttgggaggccgaggcgggtggatcatctgaggtcaggaattcaagaccagcctggccaacatggcgaaaccccatctctactaaaaatacaaaaattagccgggtgtggtggtgtgcaccagtaatcccagctacttgggagggtgaggcaggagaatcgcttgaagttgggaggtggaggttgcagtgagccgatatggcaccactgcactccagcctgggtgacaagaatgagactccgtctcaaaaaaaaaaacaaggtgacttattgatcggttggtgaaaatgtgaccagaggtggtggtacacacccgtggtctcagccactctgggggctgaggcaggaggatcacttgagcccaagaggtcaaggctgcagtgagctatgatcgtgccactgcatacctgcctgggcaacagagcaagaccccattcaaaataattttttaagaaagaacatgaccagtgcaagtcacaagaatcgactatactttatatttcctcccttttgcacatagatagcagtaagccacacacagcattgtttgtttgcctcctgtttttcactcattgtggtagaagtctttccatatcactgtagaccttcttcattcatttccctaagtccttttaaattctacttgcattgttttacaaaatacacaacgtaagcagacactgtttaagtatcatagcgatagggcaagcctcagatataataaactcaaccggaattcaccgatctgttcacatatttcaaggcctgcccagtgtcaaagatggattcttttttttttttttgagatggagtcttgctgtgttgctcaggctggtctcaaactcctgggctcaagtgatcctcccgcctcggcctcccagagtgctgggattacaggtgtgagctatcacgcccatcccacaagtagattttaagctgaggggtggtgatataatttgccttaagctttttaagttacatgtttaaggggccagttaagaccacacatcggggtccagagccacacgtgacctctgtccttgcgtccccagccatgctgcggatggtctcagcagttctccagtttggcaacattgccttgaagagagaacggaacaccgatcaagccaccatgcctgacaacacaggtactgcccccggcctgcctgcccacgacctccagcccccgcccaggtggtgcccagccctcctgcacccctgtcccacgtagagagcatcccccttccagccacacctgtctccaacccaggatcactctgatttcctgcattttttttttttttttttttttgagatggagtctcgctctgtcacccaggctggagtgcagtggcgtgatctcagctcactgcaagctccgcctcccgggttcacaccattctcctgcctcagcctcctgagtagctgggactacaggcgcccgccaccacgcccggctaattgtttgtatttttagtagagacggagtgtcaccgtgttaaccaggatggtctcgatctcatgacctcgtgatctgcccacctcggcctcccaaagtgctgggattacaggcctgagccaccgtgcctggccgatttcctgctttttgctgagtctttgccaaaataacatcaaccactcttttcctgattctaaaagcgtgagctctgctgaaagtgaaccgcaccagcacgacagtggggaacagcaggagcccatcctcccagaccccctctccccacagggagccaccattagcatttggcgtagcttctccagcctctgcactctgcagagacacacttctttttgcctttcaagaacagaattatagtcaatatcccttactttaaaccaaaatagaaatagctatgtctctttattattataaaataatacaagctggaagggggaaaaatctggcatgacagaaaagtagaaaggaagagagaaaattacccataatcacctgtaatcccagcactttgggaggccaaggcaggcagatcacttgaggccatgagttcgagaccagcctggccaacatgacaaaacttcttctctactaaaaatacaaaaattaactgggaatggtgatgggtgcctgtagtcccagctgctcaggaggctgaggcaggagaattgcttgaacccaggaggcggaggttgcagttgagccgagattgtgccgctgcactccagcctgggcaacggagcaagaatctgtctccaaaaaaaaaaaagaagaagaaagaaagaaaaagaagaagaaagaaagaaaaagaaaaagaaagacaattacccataatcatattcccagagataattgctgctcacattttgggatgtgtctctctgggctttgttctgtgtctgtatcactgtggatatagagtgtcacagaaatggaatcgtgcttcaccccctcttcccctggagacagcaagagctttctgtcctgattatgaaatccgatgggctcatttctgaaagctgcacagcacagaaaataggaggacaggatgtattaccccactatgctgctggtaacagcattacctgaggcacctgggggctctgtacataggcacccagcaggtgtgccgtgcacacacatttactcatttgttttacaaaactggagtcagaccctgcaaactgttttgaaacctgcttttttttcccctgaatgctttcgggataacttttcaggttattcacaagaaactctactgggatcccttccctccctccctccctccctccctccctccttccctccctccttccttccttcttttagatagaactgtactgggattccctcgctccctccctcccttcctcctgccctccctccttccttcttttagatagaactctactgggattccccccctccctccctccctcccttcctttcttccttccttccttccttccctccttccttccttccttccatctttcctcttttaaatgaagtctcgcccagactggagtgcagtggcaccatctcagctcactgcaacctctacctcctgggttcaagcgattctccctgcctcagcctcccaagtatctgggattacaggcacgcaccaccatgtcgggctaatttttgtatttttagtacagacggggtttcaccatgttggccaggttggtctcaaactcctgacctcaggtgatccgcccaccttggcctcccgaagggcctccctgggattacgggcgtgagccaccgtgccccgcctccagtgtagcttttagtgactgcagaacattctttcaaatgggccaggcacctgtaatcccagctactcaggagctgaggcaggagaatcacttgaaccagggaggcggaggttgtagtgagctgagattgcatcactgcactccagtctgggtgataagagccaaactctgtctcaaacaaaacaaaacaaaacaaacaaaaaaaccatcagaacattctttcaaatgaatgaagcccgacccatctaaccaattcccgcttcttgggcactgaggttgtttcctagctttctccgattataaacaacactgcgctgaacatccttgtggcacggtctttgctcacatgcagggttattttgccagtgctggttcctggaaaaaaaatagttgggcagagaatgtacacacttttgggactcgtaatgcctctcctgggaaaggcggggcccgtcttctgctcccccaacagtgtgggaaacggtaccctctcccttgctgggcagcaagcacctcttcccagtgctgatggaatcttggtgcctctcgccctcagctgcacagaagctctgccgcctcttgggactgggggtgacggatttctcccgagccttgctcacccctcgcatcaaagttggccgagactatgtgcagaaagcccagactaaggaacaggtaggcggggctggcggtgggcaggcacagaaagagccgcgcaccccggccctgggtctttaaacagtgtatgctgtttttcccaccactcaacagacttttgctgagtgcccgctccgttaccgatcctggtctaggtgccaggcgtaaaagcagtcatcgaaacaaataaccaggccctcagggacctcaagttatagtaaggaaatggataataaaagttcaacaggatgtgtctgggagtggtggctcacacctgtaatcccagcactttgggaggccaaggtgggaggattgcttgagcccgggagtttgaggctgcagcgagctgtaattgcgccactgcactccagcctgggtgacagactgagactctgtctctaaaaaaattaaaaaatttaataataatttaaaaaaacaggatgtaaatgcaacatggtatcctagaaaaacaaaaaacaaaaacccaggatgcttttagatggtgagagcacctgtgaaggggaggttttgttggtcaggaaagtcctctctaaggaagctctaaggatgaaacattcgagatgagacctagatggttcgaggcagacggaaccgcaagtgtaaaggccctgggggtggagcaggcttggggagttgggaacattaagcaggtcagtgaggccgggtgtgggggctcatgcctgtaatcccagctctttgggaggctgaggcggacagattgagctcaggagttcaagatcagcctgggcaacatggtgaatctccgtctctactaaaatacaaaaattagctgggtatgtggcacacgcctgtagtcccagctacttgggaggctgagacacgaggatcacttgaacctaggaggcagaggttgcagtgagctgagagcacgccactgcacttcagcctgggtgacagagcgagactctgtctcaaaaaaaaaaaaaaaaagaaaagaaaaaaagaaaattgaaggaggtcaggtcagtgaggctgaagagcaagggagagagggtgggtgaatccacagtcagaaatgtcagcaaggggcagatcatgcagggtcttaggggccacagtaaggaggtgagttttattcaaactacataggaggccattgaggttttaagccagggagtgacttgattcagtttgtctttcatagaaagatccccttggctgctgcatggagaattgggttcagggatgcaggtagaggcggggagacctaaggaggctgcatccagagtcttggcaatcgtgggagctcacaccatgagcagggagggtggagtggagcgaccacaggccagggagggtttcagaatccagcttttgggcagaggcctctgctggccccaggctgggcagtgaggtacctggatgaagaccccgtgggggagatgaggagtctgggagccacactgacccgggttcaatctcagctggggtactgttgttagttcccattttacagaggagaaaactgaggcacagagaggtttattcacatgcctgaaatcacacagcccctaagtggcagagctgggattcaaacccaagttgtccggctccagagtccacgctcttaaccgctgtgcggtagaaactgctttgagggggtgagggaaggattcaagggctaacacatccgagcccgtcatgtagtacctggtgcgcagtaggacttcaggaatgtctgcctgttgttcatggcattgttcttgatggtacttacactcaaggagctgggaggcgaccttaagggggacgagctgggggcccttccccggttcacccccgacgtctttcagtctgctgatgtgcaggctgcgcccttaccatgagccctgtcccacaggctgacttcgcgctggaggccctggccaaggccacctacgagcgcctcttccgctggctggttctgcgcctcaaccgggccttggaccgcagcccccgccaaggcgcctccttcctgggcatcctggacatcgcgggctttgagatcttccaggtccacccttgtgctgggagggggatgccaacttcctcactccggtcctggtcctttctgaagccctgggtctctccccttctccctggtctctgtccccctctctctctctgagtctctgttcccccctctctctggtctctgtccccctctctctgggtctctgtcccctgtctctgggtctctgtccccttctctctctgggtctctgtcccctgtctctgggtctctgtccccctctctctctgggtctctgtcctctctctctgcatctctgtcccctgtctctgggtctctgcctctctgtctctgggtctctgtcccctgtctctggctctgtcccctgtctctgggtctctgtccccctctctctgggtctctgtccccctctctctgggtctctgtcccctctcgatgcatctctgtcccctgtctctgggtctctgtcccctgtctctgggtctctgtccctctccatcctcccagctcacgtgtcctgcgtccctgcagctgaactccttcgagcagctctgcatcaactacaccaacgagaagctgcagcagctcttcaaccacaccatgttcgtgctggagcaggaggagtaccagcgtgagggcatcccctggaccttcctcgactttggcctcgacctgcagccctgcatcgacctcatcgagcggccggtgagccccaggcccctcccagcccacactcacggttcagatccgtctctcccagcatctgcgagaccagggtctagctcctcctctgctgggcctcaggatgccccatgggttctgtggggaaggtgacagcacctgcttcctcgatcttttgtgaccataggtgattagggcccagaatgtgcctgccacagggcccggctcaaatcaatcggttaatcagagctctcaccgtaactgttgttctcacgtttgttttttgtttgtttgttttgttttgttttgtttttttcttgagacggagtctcgctctatcgcccaggctggagtgcagcggcgcgatctctgcttactgcaagcttcgccccctgggttcacgccattctcctgcctcagcctcccgagtagctgggactacaggtgcccgccaccacgcccggctaattttttgtatttttagtagagtcgggggtttcactgtgttagccaggatggtctcgatctcctgacctcgtgatctacccgcctcggcctcccaaagtgctgggattacaggcgtgagccaccgtgcctggcatctcacgtttgtttttatgtccaagtgtgacttataagagctaaaaatcagcagccacctgagtgtccaatatgtggggatctgacttactctccccctgctgtcaatggccaggccaacccccctggactcctggccctgctggatgaggagtgctggttcccgaaggccacagacaagtcgtttgtggagaaggtagcccaggagcagggcggccaccccaagttccagcggccgaggcacctgcgggatcaggccgacttcagtgttctccactacgcgggcaaggtaggggctggggccggccttggggcatgtgggagtggggatcaagggatctccactggctacagatggggggagggtgcagagggaaaacagggtcctcctgaggtccagacaaacagagcaggggctaggagagcccagggaggagcaaggattctgtctgatgggatcaccaaaaacttcctcaaagaggtgatatttgcagtgggttttgagggatgggtaggagttcatcaggaggcgatctatgtgcattttatccacttattcagcagatatgtgcggggtgccatttgtgtgcccagctcggggccgagcaaagctggatacacagatcaaacatggtttctgtcctcacaaagatccctatctgggagggaggcaaatacagacgatcaggatataaggttaataggtctttcagtggaggcagctgagggtagtgtcagagcccagaagagaagtacctgggaaagcttcacagaagagaatatgctcaatctcaaatctcagtcaagggccggcaaacattttctgtaaagggtccgatagtaaatagtttcagctttgtgggccagacgatctctgtcacagctacacaattctgctgtggtcacacaaaaagagccacagataatacataagtatcttcaagcccccagggaaaaagaaaggaaaaacagactgagaaacagtttcgagggctctcttgcccccagaagggcccccatgagtttgactatgaagacataaatgaaggttctattcctatatatatatacacatatatatatacacacatatatatatacacacatatatatatacacactacacacacacacacacacacacacacacacacacacacacacacacacatatatatatgtatttttttttatttgagacagagtctccctctgttacccaggctggagtgcagtggcacgatctcggctcactgcaatctccgcctcctaggttcaagcaattcttctgcctcagcctccccagtagctgggattacaggcacctgccaccatgcctggctaatttttgtatttttagtagagacagggtttcaccatgttggccaggctgctctcgaactcctgacctcagttgatccacccgcataggcctcccaaagtgctgggattacaggtgtgagccaccgcgcccagccctattccagtgaaagtatttgcaaaaagaggtggcaggctggattttgcctgtgagccatagtttgctgacccctggttttgatgatgtggaccaggcagccccagaggatgggtgaagggtgggaagggctctccaggcagagggaacagcatagacaatggctgggaggcaggagattccatgtgttctgtgtctagccctcagtttcttccccagacatactccagaactccccctgtacccagccctctgctaggccgtgagtcagacctgggccctgccctcgggggaccgctgtctggtggggggcacatatgcagagaattgtagcggccaagatcgtgactctatggagccccacagcaaagccctgagtacccagaaggagccagtggtgtgaaacccacagagacagaaccccaggtggcaggaaccgcaggggtaaaaccccgaggtgggagtaagctcgcatgtttgaggaacagtgcggaggccagggtggctggagcggaatgaataggaagaaagtggtggtggtggaggtcacagaggtggcagggggcatagaggggaaggagagagaggggaccatgctggtggggtgcagttcagaatatggacacaaggtggcaccagtgctcgcttgtccatggtgagctccagacctgggagtctcagagcttctggaaggctccttaggaaatccagagaatgtctgagcctgcaagtcatcgccctcctctacctgacttcattcaggtcgactacaaggccaacgagtggctgatgaaaaacatggaccctctgaatgacaacgtcgcagccttgctccaccagagcacagaccggctgacggcagagatctggaaagacggtgaggacccacttcccccaccccggctctaggggtctgtgcggccattctccaaatccacagcgtgagcacctttgtttcagaggcggaggtctgaacctgagttttctgctcagacccagaatagccagtgtcacaaatagtatttcaaatcagtgatggatggatccatagattaattgattgactattgatttgattgataagccagcatccttctcaaggataaagcactccgccttaatcagaaacgtggcaaagatacccactaacactactgttaaacatcgtttttttagcaatactagcctatgcaatcagaccagaaaaagtatgaatatcgaacaggaagaagtaaacttattatttttagatggcctgtgttccctaaacaattaggagatttggctgggcatggtggctcacacctgtaatcccagcacttttgggaggccaaggtgggcggatcacttgaggtcaggagttcaagaccagcctggccaacatggtgaaaccctgtctctactaaaagtacaacaattagccagatgtcctggtgcatgcctgtagtctcagctactagggaggctgaggcaggagaatcgcttgaatctgggaggtagaggtttcagtgagccaagattgtgtcactgcaatccagcctgggtgacagtgtgagactctgtcccaaaaaaaaaaaaaaaattctactgagaaataatttataacaataagagaacacagaatgatgatcttttgcaggtcagtcaacttttaggctttgctttctttgttttcttacaaagttcccttcacgcccccagggaagaagaaagaaaaaacagactgagatacagttttggagggctttcctgcccccaaaaggcccccatgagtgtgactgtctttttggattgacacttctaggggtcataggcagagatgccaaatgccctgtggtaggactctgaccttttccaagccttttctgccactgcccctgcccccccatccttagaggaggtttgagaaatggttttagaaagctggcagaactggcatcctgttttttccaggttccaagtttctggcatttgtcagtttgccttaatcttttattgacatgaaaaggtagctgtagaaataccagtccatgcaatttggcaagaaaacaaaatgagcggccaggcgcggtggctcacgcctgtaatcccagcactttgggaggccaaggtggacgggtcacctgaggtcgggagtttgagaccagcctgaccaacatggagaaacctcatctctactaaaaatacaaaattagctgggcgtggtggcacatgcctgtaatcccagctactcggggggctgaggcaggggaatcgcttgaacccgggaggtggaggttgtggtgagccgagatcgtgccattgcactccagcctgggcaacaagagtgaaactctgtctcaaaaaaaaaaaaaaaggaaaaaaaaagaaaacaaaatgagcaaggtgagtggttcccaaaacacactcacagagcaaaacagcatggagggtcttgatcttgtgagctcatgctagaaagatagattttatttttatgtctcatatagtatttacacaaggagattggaaagcagagtttgatgttcaggaacagaaccagattatgctacgagaatcatctcccggctgaaaatctgctgcccttttaaaatatttgtgctgtcttcataaacacatgattctccacagtgagccctcatttgtcacactctgtgtgtgcctgactctcagagggttccaaaagaaaaagtggaagctgcaaaacctcctggctcagcctcccgagtagctggggagctgccataatgtcacttcctccataatcctcctaaacaaagctagtcacaaggtcttcccagattcaaggagctgcaagacacaggcaaagggtgtcaatacaggggaaagtggggaatcggggccatttttgcccaatctctgctagagctgctttgagcccagaattggatgcccagcatcctgacagcccagggaaaaacggaaatgagattagctctcctctgagaggcaaaaacaacaagtggcctgggagcatcaagttcattcttgagcttcctggcagccagagcaaaaagggcaacctactaaaacagacacaacctctagagggagagattttttattctttgcactgaattcttacagaggacattcgtccttttggccaacagtgtgtggatacaaagatgaacaggagttcagaagtttatggccaacattctggttttccatcttgctttgctctgtactgttgactaataaccctctcctctttttcttcctgccacctcctctccttcccctcttttcatgcatctctctccgccatctctctgccatctcccctccacccacccacacatctgtcctcactccccagaacatgggggcttccagcagttctctttccttggctccttcccaccgtcgcccccaggatctgcagagaggtgcagctctgctatttctccgccagggggtgggtgtctctgtgcatcgatgggtgaggcttgctggaggaggagggtggacctgttgggctggggacctggttttgaacatctgtcccctctcctcttactgtggaggtctctcactcttcctttccctccttgttggctcccttggaagtttccagactctgtagcagcagaaccccttcttctaactaaactgcatgtaaaagtacaaacaagcgtgatagtaccagctcgcgtttcttgagcacttactatgtgccgttcaccatgtgaaacccctttagaattatcaacaccccattacacaaatgaggaaactaaagcacagagaagttaagtaacttgctgaggtcacacagccagtaagtggcagagctgggatttgaacccaggacatcagattccagaactttagttcttatctgtgctatgaggacttaataaatgataattatcattttgaaaatgacagggagtacggggtaggggagacggttgaacctggggaagaaaataacatatttgagcccctgccatgacctggccctgccctaagcacagattatctagttgacggttgatggcgcttgaatgggatgagttttgcaggacatcagattctgccctagctgtgggttcctgaggaacctggcatgattcaacacatagaatttgggaccaggtgcattggctcacccctataatcccagcgctttgggaggccgaggtgagaggatcacttgaggacaagagtttgagattagcctgagcaacacaggaagaccccgtctctacaaaataaatttaaaaattggtgggcatggtggtgtgcgcctgtagtccaaactacttgggaggctgaggtaggaagatcacttgagcctaggaggttgaggctgcagtgagctgtgatcactccactgtactccagcctgggtgacagtgagactgtgtctcagaaaacaaacaaacaacagaattcgagacagtgccaatagaaggaatggatatttttcactacccaaagcagcaccgccaagcggcactagagaaaatagaatctttttgttgagacagagtctagctctgttgctcaggctggagtgcagtgacacaatcttggctcacggcaacctctgcctcccaggttcaagtaattctcctgcctcagccttccaagtagctgggattacaggcatgtgccaccacacctggcttaattttttgtatttttagtagagatggggtttcaccatgttggccaggctggcctcgaactcctgaccttaggtgatccacccgccttggcctcccaaagtgctgagattacaggcatgagccaccgcaccctgccaagaaaatagaacctctatgaaattaggctcttctggaaaaatggttaaaatagagacagtttgccctatttcaaatattgcatataatgcaagaatttattacatcttttaatatgtttcagattcctaaaatgcaactgcagtggttatgttatcactgttttctctctctatgcctcagtttccaaatctgtaaaatgggaatgattcttacaggcttataaagccattgatgtaaattgctttgagcaatgcctgccagagtatctatgctaggtaagcatttgctgttattgtcatcatttattgataaggaaaacagagatcatgtccttgaagagaagaagggtcaaagaccagagtttgagaggactcctactgtctgagttctaatctcggatcttcagtttctaagctgtgtgaccttaagcacattctcccactcttcagagcctcagtatgtccatctgtccaatgaagctgatatctaccttacaggctgtgtgaggtccttcatatgtaaagtgccagttgtgataaatgataagacccttgacctttggcccaggtccctaaaactgaccctgacctccttctctctctctctgcatctccatctgacagtggagggcatcgtggggctggaacaggtgagcagcctgggcgacggcccaccaggtggccgcccccgtcggggtatgttccggacagtgggacagctctacaaggagtccctgagccgcctcatggccacactcagcaacaccaaccccagttttgtccgctgcattgtccccaaccacgagaagagggtgagtgactcagcctggggaggaaggggtggctgtggctgtgggttaaggtttggcctctggacttggctggagccacatctgattcgaggaccctcaaattagctgtgtggctttgagcaaattgcttctattcctaggctcagggtccggttgggaaaattcatgcattcatatgacttaatgtattaagcatctactgtgctgggaacaggtactggggaggcattggagagaaaggcacagccaactcctgttctcagggagctcacagtctgatggggagcatagacattcatctaaccatccaaaatgaacgtccagttaaatctgtaggggtggtgagtatcacacagggcttgatctggtcagtgaagttagggaaggttccctgggggacgtgatgactgagccctgaaggatacgtgatattccaggcagagaagagtttgtacaaaggcccaatggtaggttggagcacgcgaggtacaagggatagaggaaggccatcagggctgggcttgttgcatgggtgtgacaagaccatggccagcctcactggccactgattttcatgttgagaaaatcagagaatgggccctacagagaagggtcaatgggaatggaaaacaacatgtttgccatgttgcccaggctgctctcgaactcctgagctcaagcgatccacccgccttggcctcccaaagtgctgggattacaggcgtgagccaccacgcccagcctgagatcccatattttatcaaatctaagccatgtattcctccccactagcgtctctgaagtcgagatgtagcttagtcaacggcctgtcagggtttaattaccagtctttttcctttcttggtggcatatttaacgacagcgtgtgccactggaatttttgtactgtttagatttttgccatttgtgcattactgttgaaaagagaaaaggcggcctggcacggtggctcatgcctgtaatcccagcactttgggaggctgaggtgggaggactgcttgagcccaggagttcaagaccagcctgggcaatggcgaaacgccgtctctactcaaaatacaaaaattagctgggcatagtggtgtgcacctataatcccagctactcaggaggctgaggcaggagaagctcttgaacctgggaggcggaggttgcagtgagctgagatcatgccattgcactccagcctgggcaacagagcaagactctgtctcaaaaaaaaaaaaaaaaaaaaaaacgaacaaacaaacaaacaaaaaccaaaaaaacatgatttaccagctttggacagacatcagcttcccaggaggccttttggcgactctcttgcgtgcaaattcagccccacccacatccctccctgcggatcttttctccttagcacttagtatttcttctttattagtgactgcttcacctagggtatttctagtttctcctactgaactctcagttccccagggcaggatttccccctggtttgagcattgctgtcttcccagggcctagaaccgttcctaggcacctagtaggtgctcagtaaattacatgtggaaacaggaaattgccaagcttgaccgtttggcgcccccgtgtggccgccgctgacccccgcgtgtccgtccgctctccccaggccgggaagctggagccacggctggtgctggaccagcttcgctgcaacggggtcctggagggcatccgcatctgtcgccagggcttccccaaccgcatcctcttccaggagttccggcagcggtgagctagagcgagggcccaggcccggcggaggggctgggtgggacccgggtctggaagccgacacacctgcattcaggtctccacccactcttgttccttctgcgctggggaagttgaggcagattactcactttgctgagcctcagtttactcgtctgtgtatgggagaacaatagcccacttgatgcactcctgagagaaagcacacagagtctatggggatctggggtacattgctgctgctgtttagggcagtaggccccaaactatgaacgtgaaatcactgcatggtgttacaaatctgcatgtctttaaaaatgaagtagaaggcggggcgcggtggctcacgcctgtaatcccagcactttgggaggccgaggcagacagatcacctgaggtcggaagttcgagaccagcctgaccaacgtggagaaaccccatctctactaaaaatacaaaattagccgggtgtggtagcacatgcctgtaatcccagctactcgggaggctgaggcaggagaatcacttgaaccgggaagggggaggttgcagtgagccgagattgcgccattgcactccagcctgggcaacaagagcaaaactctgtctcaaaaaaataaataagtaaataaagaagtagaataggacagaatagaaaataccaaggcctaatgagcaagtaatacagcaaatgtaacaaaaatgatgcttcacacaagctgtgtagagcagcaccgtcccttagaagtagaatgggaagccttgtacacaattgaacattttctaatagctacacttttacaagtgaaaaaaatgaaattaattttaacaagatattttactaaagccaatacatccaaaatactggccaatactggctgggcactgtggctcatgcctgtaaccccagcactttgggaggccgaggcgggtggatcacttcaggtcaggagttcaagacagcctggccatcatggagaaaccccatctctactaaaaatacaaaaattagctgggcatggtggcacatgcctgaatcccagctacctggtaggctgaggcaagagaatcgcttgaacctgggaggcggaggtcgcagtgaggcaagatctgaccactgcactccagcctgggcgacagagcgagactctgtctcaaaaaacaaacaaaacaaaaaactgaaacagtcgatcattgtcgatgttgctgtccttggtggtggcgtgaatgctcagatgtgagttttgtgactgtccttgttattgtcactgttgttcctgctgtgtgtcactctgagcccagtgcctggcccgcagcaggcactaggtgagcgtttgctgtaactctctcctccccacccctccctgctcattgcagatacgagatcctgacacccaatgccatccccaagggcttcatggatgggaagcaggcctgtgaaaagatggtgagtggggcagagcctggaatgcgtgtgtgcgtgtgtgtgtgtgcgtgcatgagtgtgcgtgcatgtgtgtgtgcatgcatatgtgtgcatgcgtgtgtgtgcaagtgtgtgtgcatgcacgtgtgtgcgtgtgtgtgtgcatgcatatgtgtgcatgcgtgtgtgtgcatgtgtgtgtgtgcatgcgtttgtgtgcaggggcccaggtggtcggggagtggggctgggatctccccttcattgaccttcctcattacctctccctatcaccgcccccacccccgcttcctcatcatcccctatcacccccctccccgtcaccccatcaccccctccccatcaccactcccccatcgccccctccctataactcttctcccctatcaccctcctccacatcaccccctcccccatcaccccctctccccaatcaccaccccctcccaatcactgcccctcctcaccacccccccatcatcccctgccccatcacccccttcctataactcccctcccctatcactcttcacatcaccccctcccctatcactctcctcatcaccccctccccatcacttctcccccatcacctccctcccccatcaccccctcccccattaccccctctccccaatcaccaccccttccctatcactccccctcctcgccaccccctcccccattactccccctcctcaccacccccactcccccatcaccccctctccgtcatcacccctctcccacccctcacagatccaggcgctggaactggaccccaacctctaccgcgtgggacagagcaagatcttcttccgggctggggtcctggcccagctggaagaggagcgagacctgaaggtcaccgacatcatcgtctccttccaggcagctgcccggggatacctggctcgcaggtgggcagccacgctgtctcccggggtcctgttggccgagactgggtcagggaggggttgaccagatggctctaggtgtcagggcctccaggatgggtgcagggctgaggagcaggtggatggaggtgccgggtgtccaggcttcttggttctgcagtccctgaggggccctgtgggcagggcaggccctgttcagagtaagactggcaacacagaggctggacttagccgcagggtgaccagctgtcctagtgggcctgggtctgggtttcccagggtgcaggacttccagtgctaaaacagagaaagcccggggcaacccaggtcaagctgtccgctctccctggccagtccctcgaggggctccagtctggaggtgagacttccatgggcatagagtcccagtcccgggtgagacctgctttgatgggggccatagaggtgcagcaaggaggccctgctgcaggccatgactcccccaggccacaccggacaagcaggtggatgaaggaaaatgggaaaggtgatcagggcaggagcaagcttgtgcaaagacccaacgatgcaagatcctggcacgcttcaggaatacagggagtttgcgggagagtctccttcctccttagaagtggctcagagaggccgggcacggtggctcacacctgtaatcccagcacattgggaggccaaggcgggcggatcacttgaggtcaggagttcgagacaagcctggccaacatggtgaaaccccatctctactaaaaatacaaaaattagccgtaatcccagctactcaggaggccaaggcaggagaatggcttgaactcgggaagcagagactgcagtgagccaagatcatgtcactgcactccagcctgggtggcagagtgagactctgtatcaaaaaaaaaaaaaaagctgaaagaatagagtggcaggaaaggatggcccaaacaccaggctgagtggggccttgtccagaggagctagggagccatggagggctgtgagcaggggaggggtgggtcagctctgggtgtagaaagactctctggaggcgtgttgggatgggctgataggagaggctggagaaggaggccaggcagaggatccaggcaagggagggtggggcctgaactgcggctggggctttgggactgggcagagagagtcgggagcagggggacgaacggccagaacacagtgagatctcaaagtaataagagtgcctgcacacagtaggcattttatgatggctgactaagtgaaaggagcttggcttggtcaggcatggtggcccacccctgtaatctcagcactttgggaggccgaggtgagtagatcacttgaggtggggagttggagagcagcccggccaacatggcaaaaccccatctctactaaaaatacaaaaattagccgagtgttgtggcacgcacctgtaatcctagctacttgggaggtgaggcaggagaattgcttgaacctgggaggtggaggttgcagtgagcccagatcatgccattgcactccagcctaggcaacagagcaagactctgtctcagaaaaacaaacaaacaaacaaagaaaataaataagaaaggagcttggctctcttgctaaggggatggcgcctggaggctcccactctgcccctcacccatttccccacccagggccttccagaagcgccagcagcagcagagcgccctgagggtgatgcagcggaactgcgcggcctacctcaagctgagacactggcagtggtggcggctgtttaccaaggtgagggcagcctggggaggtggccccagtagggagaggatagggccttggggcttggtctgcttgacaagtgacttcctccatgtgggcctcagttttctgcatcactaaaatggggccagtcggcccaggctttgctagctgggattctttagttagcaagcaacaagaaaaatctgactcgaaccaacatggatcaaagattcaagacaatgtgggctgcacctggatccaggggtccccaagacttctgttcaaggatttgctggaaggactcacagaacttagaaaagctgctgtactcacagctacagtttatcacaatacaaagatacagattgaaaacagcaaaggtgctgggtgctgtggctcacacctgtaatcccagcagtgtgagaggccgaggcgggcggatcacttgagatcaggagttcgagaccagcctggccaatatggggaaatcctgtctctactaaagatacaaaaattagctgggcatggtggcaggtgcctgtagtcccagctacttgggaggctgaggcaggagaatcactcaaacctaggaggtggaggttgcagtgagccaagatagtgtcactacatgtagcctgggcaatacagcaaaactctgtctcaaaaaaaaaaaaaaaaaaaaagagcaaaggttaaaaaaaaaaaaaaagtacataagtgtctcggagagaccaagcatgagcctacagctgctctctcccagtgaagttctgtggacaacacttagctgttcccagcaatgaagtatgataatatgcacggagtattgccaaccagggaagctcacctgagccttgatgtccagcgtttttcctggggctggtcacacaggcatggacaaggtcacacacatggtgacctcagttactcagtctccagcccctccagagtcaaactgatgccatgtggcccagggcccccaccacagatcccatcgttagcatagactatccagggtggcccaaggccccaggtaaaccaagacactcttatcagatgggacattctaaggacttagaggtaacctcccaggagcccatcaagggccagacttttcttaggaatgtgtggggtttggacaacccaggtctgctgagttaaccctttactgcacaagggtccaaacagtgacgtcagtatgcagtgttctgcgtctcccgcttggctttcctccgtgatgatcaccaacagaggctttccacacaggggccaccagcagatggagtcttgcccctaacaaccttggccagcctggtctctcttatcatagagctccagccagattcccaggtttcatgctcattggcccagctggagtcatgtgaccatcccagagccagttagtagggatcagatgagccaggctggcatcacatgcctacccaaagcagagggtgccaagccaggtcgccatgcaccatggagctcagggactaggtgttcccccagggggaaattggaaaggaatgagaaggatggaggttttgggggcagtaatgtaattctgaatacgatgtctgagagatcagcctgcattcccttggtcagtgttaactgagcacctactatgtgcccagaacttttatagaggctggggtaaatggtgattaaaaagagacaaggtcctgccaccatggagctcacagtctgggacaagagttgctgcactgcggcctgtgggccagatggctgtttttgcaaaagccctttcgttagcatggtgtctgcagctgcatctgagctacagcagctgagtggagtaggtaaacagccagaagctgaggttaggggctcacacctgtaatcccagcacttcgggaggccaaggcaggagcatcacttgagcccaagagttcaagaccagcctgggcaacaaagtgagaccctcatctctacaaaaaaaaaaaaaacaaaaacaaaaactgggtgtagtggtgcacacctgtagtcccagctacttgggacgaaggattgcttaagcccaggagtatgaggctacagtaagccatgatcgcatcactgcactacagcttgggtgacaagagtgagaccctgtcttgaaaaaataaatcaaaattaaaaactggccaggcacggaggcgtatgcctgtaatcccagcagtttgggaggctgaggcaggtggatcacttcaggtcaggggtttgagcccagcctggccaatatgatggaaccctgtcactactaaaaatacaaaaattagctggatgtggtgtcaggcacctgtaatcccagctactcaggaggctgaggcaggtgaatcgcttgaacttggaaggtgaaggttgcagtgagccaagatcgcaccactgcactccagcctgggtgacagagtgagactctgtctcaaaataaataaataaataaaaataaaaattaataataaataaaaaacagccagggtggcctgtaaaatctcaaatatttcctgcctggcccttgaagaaaaagtttgcctaccttaggtgttgggggttggggtcaagtaggatttgattggcatcatttgagaaatgtgaatgatacctgcgaaagatgcaaggagtcggggcagaaaaggagagaatagaagggatacagaattgggtggagaggaaaagaatcaagtagacttgtgtagaacggagtagaatatgattgaacagaaattatcagagcagatctcacttagcaagggcgacgaggttttgtgaaatttttgtttcagttctgtgtgtacctctgtcactgcagcctgaatcatgccatgtaaagctcatctctcactaaggaccttggactaacaggcttaagaaacactggcctttggccaggcatggtggctcatgcctatatcccaacactttgggaggctgaggtgggtggattacttgaggccgggagttggagaccagcctggccaacatagcgaaaccctctctactgaaagcacaaaaattagccggacgtggtggcatacgcctgtaatcccagctactcgggaggctgaggcaggagaatcgcttgaacctgggaggcagaggttgcagtgagccgagatcccaccactgcactccagcctgggcgagagagcaagactctgtcgaaaggaaggaaggaagggaggaaaaaaggaaggaaggaaggactgttccacagaatagcagcagccacagtacacagtgtctcttggatgtggaaggatcctttagccagagagattagatagatcaatagtgtatttagtggtgcttgcctgtacctgtcagtgttctaggcctgtgaccagggactgttgccaaggcggggacacacagctaataggtggaggagaagggatttgaacccagaaactcaaaccccactaagagtgtgaggtcttggcgcctgaagtcagccattccacccctttcacctccacctaggtgaagccactgctgcaggtgacgcggcaggatgaggtgctgcaggcacgggcccaggagctgcagaaagtgcaggagctacagcagcagagcgcccgcgaagttggggagctccagggccgagtggcacaggtgagggggcgggggcagggcgtgggggcgtgtcttcggggtggggctgtgtcgcatgggtggagccaggtgtgaggggcggggcttccggctgagccagcctgtgcccaggcagggctgtcgggaggatgggagcaaagctaaggtgtactgaggccgggcggggattggggctgtttagtttggttgagtcgtgacgtacagggagcagggccctgggggtgtagccagggtatgggccgggtaggggtggggtgggagagtcctgcagagccagaatggagctgggctgtaggatctgggggcaggggcctcagctgtggccgggctatggtatgcaggtggcgaacttataactgtttccagtatttcagctatcttaaaataatgctagaacatttgggaggctgacgcgggcagatcacctgaggtcaggagttcaagaccactctggccaacatggtgaaaccccgtctctactaaaaatgcaaaaattagccgggtgtgatggcgcacgcctgtaatcccagctactctgggaggtggaggttgcagtgagccgagatggcgccaccgcactccagcctggtcggcagagtgagactctgtctcaaaaataataataataataataataatgctagaacaaaccccttcttgagcatttttctgtttgccttttctgcattatttcctgtggttacattttaggtatgaaatgtattaaatgaaatgtgaggtagtagaaagacccctcgggggttatttgaaggatggactggaaggggaaaggctagagtctgggaggctggggaggaggctggagagagacaggtgagagaaggaaagacctgagcctgttggggctgtagggacagagaggaggggccagagagagcaggggtgcagactgatggctgtgagaggtgagggagggcatccccaggattctgacttagtgattagggggatgtgggctcatcctgagatggggacctgagggggaggaggtggggacaccgtgtcctcctgcccctcagtcctgccctggagaacttaaaggccaaagcaagttacaaggcagtaggcacccagtgcaggttgccctgggagcactgcctgctgaccactaacctcccacacactccccagctggaagaggagcgcgcccgcctggcagagcaattgcgagcagaggcagaactgtgtgcagaggccgaggagacgcgggggaggctggcagcccgcaagcaggagctggagctggtggtgtcagagctggaggctcgcgtgggcgaggaggaggagtgcagccgtcaaatgcaaaccgagaagaagaggctgcagcagcacatacaggtctggccccttgcatgcccaccaggccaccctccagacccctctgtctacaccatccacctttgcttctacaaaccgtgtgtctttgggccatgaatttgtagaaaactcagttctaagtgaatttgcaaaaagaatacatttttgattcagatcgcgggagaccttaaaatgtgtgagcttcacctatggatggatccaggcatccaagtgatatgttcagcttcaggcctggctggatccaggtgtctgagtgatttcctcagcttcaggcatggctggatgcaggaatccaagtgatatcctcagcttcaggcatggctggatccaggcgcctaagtgatgtcctcagcttcaggcatggctggatccaggcatccaagtgatatcctcagcttcaggcatggctggatccaggtgcccaagtgatgtccttagcttcaggcatggctggatccaggcattcaggcaatgttctcagtactccccctctctccgtctcctggctgcattcacgggcaggctgccctcatggttccccttcaaaatctagtgtgtattttacactacagcacatctcaattcagatgctaaattttcattggaaatacttgatctgtatttctatttcataatttctgcagtttataaaaactagattcacatggccaagttgttccaaacatgcttaaaagcttttcagtgattgggtgtctggttttaaatttaaaataaataaaattaaataagacagaaaatttagttcatcagtccacatcagccacatttcaaaagctcagtaatgtttttttgttttttgtttttttgagtcagagtcttgctctgtcgcccaggctggagtgcagtggcaccatctcagctcactgcaacctccgtctcccgggctcaagcaattctcctgcctcagcctctacagcagtatctgggattacaggtgtgtgccaccatgcccagctaatgtttttttatttttagtagagacagggtttcagtatgttggccaggctggtctcgaactcctgacctcaggtgatccgcccacctcagccttccaaggtgctgggattacaggcgtgagccaccatgcccggcccagtagtgttttaatcaacttctcttgatccctttggtgagggagggaccctaccctaggtttatggggatggctgagcacacagcactgggcaccagacaggtgaggggggccgacatcacaccacagacggccacatggatgttgccctcaagagcagagtgaacaagcaggggctgtgggaaacaggctttgtcacaacaacaggtggaggtgacccctgggtgccgtgggaaaatgtgtttggtttgtttcagtaattccatgggctggcagggagctggaatgtgcttctcagggataagcaggcactgtgcctggtccccaggataaggagggtccccagataaggctgggggaccttatctatgggagcagagggagtaggaggacttctgtttaggccatttgaggcccctgctacttttagcaaatgtcaaggcagcacataaaattgagtcttggctaggtgcagtggctcaatgtgtaatcccggcactttgggaggatctcttaagcccagaggttcaagaccagcctaggcaatgaagtgaaaccctttctctacaaaaacaaaaacacaaaaattagccaggcatggtgtcacacacctgtggtgttgtcacactacccacgaggcctgaggtgggaggatcacctgagcccaggaggtcaaggctgcagtgagctgtgatggcaccactgcactccagcctggatgacagagtgagacctttctcaaacagaataaaataggctgggcgcaatggctcactcctgtaatcccaatactttgggaggccgaggttggtggatcacctgaagttaggagttcaaggccagtctggccaacatggtgaaaccccatctctactaaaaatacaaaaaattagccaggtgtggtagcgggtgcctgtaatcccagctactcgagaggctgaggcaggaaagtcacttgaaccccgggaggtggagattgcagtgagccaagactgcaccattgcactccagcctgggcaacaagagcaaaactccgtctcaaaaaaaaaaaaaaaagaaaagaaaaaaatttaaacagaataaaataaaataaattcaaaaaataaaattgagtcttgatttccagtgtgcccaatgactgtcatgttggcagtacccatttctataatttgtgtatttactatgtttattttatttttaaaattatttattatttatttattttttttttgagacagagtctcactctgttgcccaggctggagtgcagtggcgcgatttcagctcactgcaagctctgcctcctgggttcacgccattctcctgcctcagcctccagagtagctgggactacaggcacccgccaccacgcccggctaattttttgtatttttagtagagatggggtttcaccgtgttagccaggatggtctcgatctgctgacctcgtgatccgcctgccttggcctcccaaagtcctgggattacaggcgtgagccactgcgcctgacctatttactatgtttatagtttataatctgtacccctaacccccacacaagaatgtgatttccacaaggataggtgttccttttttttttcagaggcaagatctcgctctgttacccagacttcagtgcagtggtgcggtcatctctcactgcagaaggacagtcacttttacccatcctcagtgcctagaaccgtgcctggcatacactaggcactcaataaatgcttgttgcgctaatgaatgaaatgggaaagccaataagagtttgatccttcccggcctcacccagggcatggacatctctgaaccacaagccgcggggatccgtgggccagccatccccgctcccatccttccccatcacactccatctattggcccagtatcctcactcctcctgccttcccaccccaggagctagaggcccaccttgaggctgaggagggtgcgcggcagaagctgcagctggagaaggtgacgacagaggcaaaaatgaagaaatttgaagaggacctgctgctcctggaagaccagaattccaagctgagcaaggttgggggcctgagggcagctgggaaagtggggatggggtgcattggtgggttaatgaatggtgaacttcacgccatgggggttaccacactgcggttctcaggtgtgcaccggtgggggtgggatgggtctatagccccaagggaatgggaaggagagggaggtgtagggggaggaaggtcagagaagggtgaaaaggagcagaaacatagatgagaacaacaccagaagctgcagatcaggtaagggctgctcctggcccaactcctcctgactgccccccatcccactccacccctcaggagcggaagctgctggaagatcgtctggccgagttctcatcccaggcagctgaggaggaggagaaggtcaagagcctcaataagctacggctcaaatatgaggccacaatcgcagacatggagggtgagctcccgcccagccagtaggggtctgtgtgtgctctaatgggggacctcaggcaagccccatgtgctacagggcctcagtggctgtgtctgctaaatgggataggaaggaaggctcagggcagattgagtgtcctcccagctcttgagttcttaatgcatctctaaatccaactctctttctctccttggtgtcttgggttgtcctcctttcttcccatctgactgtcccactgtctgtctgtttcagacatgtttttgtctccctgtcccttcctgttgacttagaatcagaaacagaagggaaggggcacagggaggaggcagggctgtagacacagggcagagagagtcagagggtggaggcatgggctgttggtggggatgaggaggagaggacagtgcgtctaggacaacattgtgggaagagtccctgagatagatggggaaggtgggaggaggagaaggcgttaagggaggtgctgagcttagccttatatgtgactggggacctgtggtctctgtgagagcggctgagtgtgcaggcctggagtcctcatgcacggcccccacccctgcctccagaccgcctacggaaggaggagaagggtcgccaggagctggagaagctgaagcggaggctggatggggagagctcagagctgcaggagcagatggtggagcagcaacagcgggcagaggagctgcgggcccagctgggccggaaggaggaggagctgcaggctgccctggccaggtgcagggtggggtgggcttggtggggtaagcagcatgggtgcacggccagccagcgtggggtgcccaagtcagaagctcctgggtacaaaccccagtggagccactcaccagccacagacaggccacatcccctccgagcctcagtgtccccttctgtcaaatgaagatagcaagagttccaggcccactaggttaagggaaaagtgaaacaagactctatgtgtctggtaacttgcataacagtgcacaatgggaacaagaaaatgctatttctaggccaagtacgatggctcacacctgtaatcccagtactttgggaggccaaggcaggtggatcacttgaggtcaggagtttgaaaccagcctggctaacatggcaaaaccctgtctctactaaaaatacaaaagttagctgggtgtggtggcgggcgcctgtaatcccagctactcaggagacttaagcacgagaattgcttgaacccaggaggcagaggttgcagtgagccgagatcacaccactgcactctagcctgggcaacagagcaagactatgtctcaaaaaaaaaaaaaaaaaaaaaaaaaagagctatttcttcctcttccctgcttggcctccccacaccaaacagcccagaatcagctgagatttgccaagtggcctatgttaggaatcataataattatatttacactcgttcacagtaattgagctcctactgtatgccaaatgtggtgcttagtgtttcaaatgctttttatgcactgtgcttcatgcaatctaagacccacttgattacaagtacagctccatttcggagatgttaaaatgtgaaaaactgtgcatcttagagttgatggaacatggggggtgtgtgtgtgtgtgtgtgtgtgtgtgtgtggttaagaacacgtctttgttttgttttgaaacggagtcttgccctgtttcccaggctggagtgcaatggtgtgatttcggctcactgcaacctctgcctcccaggttcaagcaattcttgtacttcagcctcccaagtagctgggattacaggtgcccgccaacaagctaattttcgtatttttagtagagacgggctttcaccatgttgcccaggctggtctggaactcccaacctcaggtgatccattcgctgaggttaggattataggcgtgaggcactgcacccggccgtgaacacacatctttgagtctgacttctgggttggaatcctggcttctcccctttctagtcatgtgacctcatgcaaatcacatcacctctctagcctcagttttttcatctataaaatggggtaattgtagacagtactcctaaggttagtgtgagggttaaagaagaaagtgctcctcagacacttcgcataccctgagccctcaataaatgccggatgtttctgttactactttattactcttgttaatttttttcttttttactgaggtgaaattcacataaaagtaaccattttttaaatgtacaattcagtagattttgcccattcacaatgctgtgtaaccatcacctctatctagttctagaacattttctcttttattgagctggagtcttgccctgtcgcccaggctggagtgcagtggcatgatcttgcctcactacatcctccgcctcttgggttcaagcaattctcctgcctcagcctcccgagtggctgggactacaggtgcccaccaccacacccagctaatttttgtatttttagcagagacggggtttcactatgttggccaggctggtctcaaactcctgacctcaggtgatccacctgccttggcctcccaaagtgctgggattacaggcatgagccactgtgctggcctccagaacttttttatcacccccaaaaggaaaccctgtatgtattaaccaatcacagccaggcacagtgactcacgccataatccagcactctgagagtaggaggcaggagggtcgcctgagcccaggaattcaagaccagcctgggcaatataatgagaccctgtctctacaaaaaacttttaaaaattagccaagcatggtggcatgtgcctgtagtctcagctacttagaggactgaggtgggaggatcctttgaacctgggaagtcgaggctgcagtgagctatgattgtgccactgcactctggtctaggtgacagaacgagaccctctctctcaaaaaaaaaaaaaaaaagaaagcagccactccccatccctccttctccccagcctggcagcctctgatccactttctgtctaaatagaatttgcctattctagatatttcatacaacatgtggccttttgtgctttagttatttttatcgccatctccccagcaaccctggtaaaggggagtgttcatcgtcatgtcctcccacaaatcaggaccctgcccttcttaagtcacttgttggagcagggggccaggagaggatactaagccaggcctgtgtggctcctgaaccattaacccccaggtcccagttggtgctgcccccagatccagcttctctttgcaatgacgctgtgtgaagggacaggaagccacatccctgtgagagctgtaaggagggactccgggccaacccagccactcacggacccggtaacctcggcaagtgctttctccacgctagacctcagtttcctcatttggcaggaacattaaatgaggtgatacaagtaaagcactggcatgaggcaggaacttactaagtgtctcctacgattactgttgctgtcattcccactttacagctaagaaaactgaggttcgaaatgagtcaggctgggcgaagtggctcactcctgcaatcccagcactttgtaaggccgaggtgggaggatgacttgaggccaggagttcgagaccagccctaggcaacataggcagaccttgtctctttggggaaaaaagattagccaggcatagtggaccgcacctgtggtctcagctacacgggatgctgtggtaggaggatcacttgagcccaggaatttgaggctgcagtgagccgtgactgcaccactgcactccagcatgggcagcagagcgagaccctgtctcagaaaacttaaattagtactgcagccaagtgcccagtggcagagagaggattctaacctgggactggccactcccaaagcccacatccagcctctcagtccccagaaatcattgcctcactctggcctgcccctgtatcaactccacggttcttgtcacccccagggcagaagacgagggtggggcccgggcccagctgctgaaatccctgcgggaggctcaagcagccctggccgaggcccaggaggacctggagtctgagcgtgtggccaggaccaaggcggagaagcagcgccgggacctgggcgaggagctggaggcgctgcggggcgagctggaggacacgctggactccaccaacgcacagcaggagctccggtgaggcccggtggcaggccgctgtcacagcctgtgcacatacagggctgggggaaggacttaggtacaaagtctctgtctatacagaggcttacttattgtacagttgttcatgaaccaccggctctaggtccggcctgggtcaagctggggacagagatgggtcagacccaggtgttacccttgggaacttccagtctcaggggaggcagattcaggcaaagacaatctcaacccagaacaaggggtgctttagcggagtaacacggggcactgtgggtgataagtgaagacccctaaaccaagtctatgggagatccaggaagactttcctgaggaagggccttttggaaaagggttttgaaaggtgaataggagttcacccttaaagccacactccttccacagcatcaccacccagatctcctgaggagcataacatgaggccctcatattttaaggaaacatgaaaaggagaaacaaccagctcccccaaagcccctgccttcctctgctctgaaattcccatcctctctcctttcccccaataaaggtccaagagggaacaggaggtgacggagctgaagaagactctggaggaggagactcgcatccacgaggcggcagtgcaggagctgaggcagcgccacggccaggccctgggggagctggcggagcagctggagcaggcccggagggtgggttggggcagggggacagggcaggggggccacggggagggcagggcaggacgcggggttggaggaggtaccgctggctggttctaggctagctcatctccctgggcccctttcctcacgcattcatgtgcatctttcattcagcaagcattaatggggtgtggactatgttccaggagcattgctggggaaccagccatgaacccaacaaccagcactgccttcccttgtggagctttccttttagtgagagaggcagagggtaaacaatataaacactttcagtttatattggggtgataagtgctatggggccataatgaacaggaaaaagggatcagaattctaaggcgggtgagtttttaagtagagaggctgtggaggtattctgcgagaaggtgacatcagggtaaaaaactgagggagtggccgggcatggtggctcttgcctgtaactttgggaggctgaggcaggcagatcacttgaggccaggagttcgagaccagcctgggcaacatggtgaaaccccatctctactaaaaatacaaaaactagctgggcgtggtggcacacacgcctatagtcccagctacttgagaggctgaggcaggagaatcacttgaacccaagaagcagaggttgaagtgagtcaagattgtaccattccactccagcctgggtgacagagcaagactctgtctcaaaaaacaaacaaacaaacaaaaatgggccagacgtggtggctcatggctgtaatcccagcactgtgggaggctgaggtgggtggatcacctgaggtcaggagttcaagaccagcctggccaacatggcaaaatcccatctctactaaaaacacaaaaaattagccgggcgtggtggtgggcgcctgtaatcctagctacttgggaggctgagacaggagaatcacttgaacctgggaggcggaggttgcagtgagcagagatcgtgcctttgcactccagcttgggcaacaagactgaagcactgtctcaaaaaaaaaaaaaaaattgggagtgaggggtgagctatttgttcactgggagaagtgtgttccaggcagagggaacagccagtgcaaaggccctgagatgggagtgtgcctggcctggtccaggaaaggcctcatagatctttgctcatctccttcccacaccagggcaaaggtgcatgggagaagacccggctggccctggaggccgaggtgtccgagctgcgggcagaactgagcagcctgcagactgcacgtcaggagggtgagcagcggaggcgccgcctggagttacagctgcaggaggtgcagggccgggctggtgatggggagagggcacgagcggaggctgctgagaagctgcagcgagcccaggtaagtggggtgggcagggcagaggtttctgctgtgtgaccttggtgacatgcctgccctctctgggcttctatttggtccatatcaaaccaattgtctcgtttggctcttccaacataatcatgtacaagtctgggcacagtggctcatgtctgtaattctagcacttgggaggccaaggcaggaggattgcttgagcccaggagttcgagaccagcctgggcaacatagtgagaccccatcttcagaaaaaaaaaaattttaattagccaggtatgctggcatgtgcctgtagtcccagctactcaggggactgaggaaggaggatcccttgagcctgggaggtcgaggctgcaatgagctgtgattgtgccactgcactctagcctgggcaacaaagtgagatcctgtctcaaaataataataataatacccagtactttgggaggccgaggcgggcagatcacctgaagtcagaagttcgagaccggcctcaccaacatggagaaaccctgtctctactaaaaaaaaaaaaaaaaaaacacaaaattagccgggcgtgatggcgcatgcctgtaatcccagctactcgagaggctgaggcaggagaatcacttgaacccgggaggcagaggttgtgatgagctgagaccgcgccattgcgttccagcctgggcagcgagagtgaaactccatctccaataataataataataattcactcatttaagatgtgcaattcaatggattttggtatattcacagagtggtatggccatcaccataatctaattttggaccattttcattatcccaaaaagaaaatcctataccctttagctatcatcccccacttctcccccaccccacccagggaaccactaatctcctttctgtctttactgatctcccattctggagatcttatataaatggaatcctactatatatgggtggcctttgtggctgccttcttttacttaacataacggtttcaagattcatctgtgttgcagctcgtagcataattccttttttattttttaatttttaaaacaccagctgggtgcagtggctcatgcctgtaatcccagcactttggcagcggaggcgggtgggtcacctgaggtcaggagttcaagaccagctgcctgaccaacatggtgaaacttcgtctctactaaaaatacaaaattagccgggtgtggtggcgcatgcctgtaatcctagctacttgggaggctaaggcaggagaatcacttgcacctgggaggcggaggttgcagtgagccgagattgcaccattgcgctctagcctgggcaacaagagtgaaactctgtctcaaaaaaaccccaaaaaacaacagcacgcaatagatccatatacctttctattgccgaataatgcccgttgtatggatattccacatttgtttatccattcgtttattgatggacattggggctgttcccgcctcttggcgatggtgagtaatgccactgagaacattccggtacgagtttctgcatagacctatgcgttcatttcttttgggtatgcacctaggagcgggattgttgggtcatgtgggaaccctatgtttaagcatctgtggatctgccagactgttttccacggcagctgtaacatttcacattcctgccagtgtggtagagagttgaggcagatggggtcactgggtggaagccacgattggagggcttcattcccgtcccttccctgcaggctgaactggagaatgtgtctggggcgctgaacgaggctgagtccaaaaccatccgtcttagcaaggagctgagcagcacagaagcccagctgcacgatgcccaggtgaccctgcctgcccttcggctccaccgtcaccctcccctccttgtcctcccagccacacctgacattgccgtctcctccatctacaggagctgctgcaggaggagaccagggcgaaattggccttggggtcccgggtgcgagccatggaggctgaggcagccgggctgcgtgagcagctggaggaggaggcagctgccagggaacgggcgggccgtgaactgcagactgcccaggcccaggtgagcagccctacgtaagaccttcagggaggcacagcccccctcactgctcctcctgggttccccagctcagggatggccatgctgcccaccttctcataggccagacccatgggtgcctttctcatctctgactcccccttaccccccacagcccatgcccagccctggctgtcctgacccctgactctcagcctcatcccttgtcccagctccagctcagccccagctccagtgccgtcctctcccatctagatcctcctcttggcctctgggcctccagcctctcccctaacagctcatcccctgcacagccccagaagcttctttctttacctggagctgaccctgtccctcctctgctcacagctctcccacgcctccccagtactcctagacaaagtccatgcctctcagtcaggcattgaggccctgcaatctctggtccttcctctgcctttagctgtattcatctctatctctactttcctattttatttgaaaaaaaccttttatttttccagacttagcattaggctcccctgtgggaagtttcctgacccgtcttctctttctcctctgtcccaactccagtcaccttgggctgggactgtctctgcccatgagtctccccaccagactgagagccccttcaaactagaatcccatcagagttagatccaggtctgtagcacagcctgatatagggcctgatgtatggtaggcgttgagaaatgcctattgaatgaatgagtgatggtacgtgcctgcagatatccttcaactggcagacttctatgcatacttcaagacccatctcaaatgctcctccttcaggaagtttctcctgaatgttctaaacagattctgggcacttcctgtggacctccatagctcccatactgctaccttaacccctatcaccctggctgtgactctgtgtctcccccagcagccgaggggctccccaggaaagactccaggtctgattcacctctgcatcttggagggagtaattttaattccctggaagaactagggctcatagtattcacaacttcacaccactcagaggcagaagagcccagcagaatgacccctttccctcttcaggcctcagtctcttcatcctggaaatggagcaccaccagcttacaccttggtcactcatggccgtgaccaccaaccaccctctctctcctcccctcagctttccgagtggcggcggcgccaggaggaggaggcaggggcactggaggcaggggaggaggcacggcgccgggcagcccgggaggccgaggccctgacccagcgcctggcagaaaagacagagaccgtggatcggctggagcggggccgccgccggctgcagcaggagctggacgacgccaccatggacctggagcagcagcggcagcttgtgagcaccctggagaagaagcagcgcaagtttgaccaggtggggcacctcagttcacccagccggggaatcagcaagtccatctacgcttcccatggtcgttgtgaggaaccagtaatccgtgctgtcacggctcaactaggcagttgtagtggaccaggaagcaagacccttctttgctctgggcctctgtaaaataggacatccctctgtcctgattcatgcctcttgccacagcataattcctcgtagcacccacttttactttcagagctgccctggtttttggatgacaaaatatacgaataccttcagtaccccagagattgcttatgagaattaaatcaaataactcatctcacttctgctgattcacggggtacctcaggcaagttgctttttccatctcagcttcagttcgcccatctggaaaatggcaataataccaagcatctggcagcctgaggatgaaataaaaatcacagaaccttagagagttcagatcaggcaatcctgaggttcagatcccaattcggcctcttgatggctgtgtggcttgggcaaattgctcaacctctctgtgctttattttattcatttagaaaatgcagtgtgaagctgggcactgtggctcatgcctgtaatcccagcactttgggaggccaaggcgggcggattgcctgagctcaggagttcacaaccagcatgggcaacacggtgaaaccccgtctctactaaaatacaaaaaaattagctgggcatggcggtgtgcgcctgtaatcctagctactcgggaggctgaggcaggagaatcacttgaactggaaaggcggaggttgcagtgagccaagatcgtgccactgcactccggcctgggtgatagagcaagactccatctcaaaaaaaaaataaaaaattaaaaaaaatttttttaaattgtcatttccctgtaggtggtgcagtatgtttttctagctgacttacgatttctctctttatgtttggttcttagtggtttgactgtgatatgcccagctgtgggttttttgtatttatcctgctttagattcactgtgcttcctgtagctgtgggttgatgtttttgatcaaatgtggaacatttcagccattatttcttcaaatatttttatctcccactctctctccttccccttcttcttggactccaaatacatatgatttgattgtaatactcttccacaggtcattgaagctttattatttttggcatcttctggaattttatataaattattttcacataaatctcttttgggatgggcttattttactcaaaataattttttttttttgagacagagtctcgctgtgtcaccaaggctagagtgcagtggcacgatctcagctcactgcaacctccacctctcaggttcaagcgattctcgtgcctcagcctcccaagtagctgggattacaggtgtgcaccaccatgcctggctaatttttgtgtttttaatagagacgaggtttcaccattttggcaaggctggtctcgaactcctggcttcaagtgatccacccacctcggcctcccgaagtgctgggattataggagtaagctaccgcacccagcctcaaaataattagtctgagatccatccatatttttgcatatcaataatgtattccatgtatcaataatgtatttttgctgctgaatattattcctgtggtatagatcagccacattttgatattcattaaccttttgatgaacatttgggtttttttccagtttttttctagttatggataaaaccttagtctttctcaaaggtggttttaattaacatttccctaatgaccagtgacgttgagcatcttttcatatgcttatttgccatccatatatcttatttgctgaagcttctgttcagatcttttgcctatttgttaattaatgttgtttgttttactattattgaattttgaaaattctttatgggccgggcacggtggctcatgcctggtaatcccagcactttgggaggccaaggcaggcagatcacctgaggttgggagtttgagaccagcctgaccaacatggagaaaccccgtctctactaaaaatacaaaattaggtaggcatggtggtgcatgcctgtaatcccagctacttgggaggctgaggcaggagaatcgcttgaatctgggaggcggaggttgtggtgagccgagatcatgccattgcactccagcctgggcaacaagagtgaaactctgtctcaaaaaaacaaaacaaaaaacaaaaaaaaaacaaaaaaaaagaaagaagttatttatgtattctaaatgcaagttctttatcagatatatgctttgcaaatatttttgtccagtctgtggcttttctttccattctgttagagtctttcaaagaacagaagtttttaattttgtccaatttatcaatttgttgttttatagattgtgcttttagtattgtatataagaaatttttgcctaactcaaggtcacaaaggttttatcctggtttttttcttgttttctttttgtttgtttgtttgttttgttttttgagacggagtcttgcactgttgcccgggctggagtgcagtggcatgatcttggcttactgcaacctctgcctcctggggtcaagcgattcctcctgtctcagcctaccaagtagctgggattacaggcacatgccgccacacccggctaatttttttatttttattttttttttattttttatttttagtaaagacagggtttcactatgttggccaggctagtctcaaactcctgaccttgtgatccacctgcctcggcctcccaaagcactgggattacaggcatgagccactgcacccggcctatcctgttttttttttctggaagtcttccagtttcaagtttacatttaggtctgtgatttattctgagttaatttttacatatgatgctatcatggctccatgttaatttttgtgaatataaatatccaagtattccaacactgctctccactgacttgtttttgcatatctattgaaagtcatttttcttcttcttcttctcctccttctttttcttcttcttcttctttttttttttttttttgcccaggctggagtgcagtggcgtgatcttggcttgctgcaacttctgcttcccgggttcaagcaattctcccacctcagcctcccgagtggcttggattacaggtgtgcgccaccacacctggctaatttttgtatttttagtagagatggggtttcaccatgttggccaggtggtcttgaactcctgacttcaggcgatctgcctgcctcagcctcccaatatgctggaattacaagcataagccactgcaccagccttttcttcttatttgaagttattttgcctcttctagttcctttgcatttccgtatgtattttagaatcagtttgtcaatttctaccccaaaacaaaaagccttccaatttggaactgtgttgaatctatacaacggttttggaagaactgacatcataacaatattgagttttctcaccgaggaagagggtatatacgtccattgaaataccttagaaatgttttttagttttcaatgtacatctttcacatctgctgccagatgtatttctaagtatttcatggttttatggctattttaagtgatgttgctttcatttccatttttgattgctagtatatagaaacaatagatttttgtatattgatcttgtatcctacaatcttggctaaactcacttactagtgctaatatagtttttatatatttcattggattttctacatagatgatcatgttttctgtgaacaaaggcagttttacttctttctttaccttttctttacccttctaggactccaaatgcttgtatgtatgactgcttggtacttttttcaggttgttaaagttccattaatttctgttacaatcttctttctttttctttctttgctctgtttggataatttatattgacctgctttcaagtttactgattctcctgatgtgtccagtctgctactaatttcatccagtgacttttttatttcagatatttcatttttcagttctggcatttctatgtggttctattttacagtttcaaatccctcctcaaataactgcctcttcacccattgtatctgtctcgttctgaaacttatcatgaagtccttgtgtgcacgttctaatatgtaggtcatctgtgggtctatttgtatggactgatttttctcttaactatgagttctgttctcttttcttttttgcatgttttataagtttatttgccaattactgtgtcttaaaaaaaaacagtaaaggttgaagtacatttaaaaatatatatatgtgtattttttctactgccactcttaagaggaaggaatgccctttcttctgttgaacatatagagttagggactgatcagtttgatccattcaagagttaagctggtttgggacacggttgcaactttaatccctctacctccctcttgtgtctctgcctttgtctgtctctttctctctctttctctgttcctggctgctccctcttcccgttcccttgtacactcctttcagctaatctatttccccctaccccatctccctcaaactggaagcttctggcagaggagaaggcagctgtacttcgggcagtggaggaacgtgagcgggccgaggcagagggccgggagcgtgaggctcgggccctgtcactgacacgggcactggaggaggagcaggaggcacgtgaggagctggagcggcagaaccgggccctgcgggctgagctggaggcactgctgagcagcaaggatgacgtcggcaagagcgtgagcagggcccccgctccccgggacacactgggtgaggggagacacgtacatgcatgtatgctttcacacatagaacatgaaaaacaaccagccatcaaagtcatatgttcatgcacaaagagaacaagagggctgggcatggtggctcactcctataatcccagcactccagcactttgggaggccaaggtgggcggatcacctgaggtcaggagctcaagaccagcctggccaatgtggtgaaaccctgtctctactaaaaatacaaaaattagccaggcatggtggcacatgcctgtaaccccagctacttgggaggctgaagcaggagaatcgcttgaattcaggagggagaggtttcagtgagccgagatcattccactgcactccagcctgggtgacagagcgagactgtctcaaaaaaaaaagagaacaagagggggactgttcagcaaacatttgcatccatatagacacacacagcgtgaagagaatctccaccaaacactgtgctaatgcacacgcatagaaagtaaggagagccattcaccagaggcaggtcttcatgtagacattcacagaacgtgaggagaatcttccatccagcacatgtgttcacacacagaatacaagagctgctcacaaagcacacatgctcacatttgtgtacacgggatgtaaggagaatcttctattacttgtttttgtttgttttttgttttgttttatttttgagatagggtcttgctctgttgcccaggctggagggcagtggtgcaatcatggcacattgcaacctcagtctcctaggctcaagcagtcctcctgcctcagtctcccgagtagcagagactacaggtgcattccaccatacctggctgttttttaaattttttgtggagatggggtcttgctgtgttgcccaggctggtcctgaactcctaggctcaaacaatcctcccacttcagcctccctaagcattgggattacaggcatgagccactgcaccttgctgagaattttccattaaatacacatattcatgtgcatatgtacacatacagcatgagaaaactactcaccacacatatgtatggatgctcagagagagaacacgaagagaatttactacaacacacagcctgagaaccactcccccgacatgactaggtgcatgcatacatacataacacacatacacacacacacacacacagtgtgaggactcccactttgcctgccaccaattccactgagcacacacagactctcccaccaagcctctgtcttcccttaactcgtgtatccctccagggcctgtagggtggtgccccaaggcttctcgcaggctcccctcacccagccagtgtcccagccttccgaatggtcaaaatgacccgccacatcctccactccatccttccttcattcatcctctgaatacatttatggatcacacccagggacacaggccaccctcactaatgatgggaggcactggcagaatttgttgagctcctgaatagatgctgtcttgacatccttatttctttattttcccaacaacgtgcttctaggagtccaatgggtgagggctttatcttctccacgcacttagacgttgatccgattttgcttttagccaggcctggagagaacccctctctccctgacacagacctggcctgcagccctagggataattgagctaaaacccagctcatacttgagccgttaaggtccgtcccttgggaaaaatgtcaggttatttgtagtgactccaaaggcccttgtgggaaacaggatgttgatgggagaaagtttgatcccttcaagtaaacaaaataaattggcaagtaccaaataggaagggaggctagagggcccattccacggaccgaaagtagatactgtcagtgaccagaattgtaatgaacatcatgtgggcagtggcgatccacagacataggccttgctctgtggaactcacagttcagtgcgggaggcgggtgttgcacaaaaagccacctaagcaaatgtcaaatgaccactgtgactagggctaggtaggagaggggccccagtgccaggagcatgggtagcagagaggccctgatgggttaagagaggcttccttgaggaggtgacagttaagtaaggagaggggtgaagggggagtctctgaaaattcataagcccagctctattttcacagcatttgggggtttaattcatacctccctgaaagatcagggaccctcccaaacagaaaacccaatagaagtagatagtgggtcggtgacaccctggggagtctggcaaacaccagcactgatgaccctggagctacgtgccttcaacccattcgcacagaattcccaaagatgaattcccagtgagtgagctcacagtgcaaaattacaaaactcagagggaataatccaccatgagtgagagtcagctgacctaacagacgcttgtattggactctgaagggcttcagataatagaattatgaagcatcagttattcatgaaatacattttggggtgatgctgaatgagacacctaggaaggagccgttcagcagattttgaatggatgaatgaacaaactaggatgggcacactgacttgccatctccccatcctccatcaaatcttcccctactctagctaggctcctaacctcctctgcctcagtgacccaggtacccagcagctactctccccaccaggtgcatgagctggaacgagcctgccgggtagcagaacaggcagccaatgatctgcgagcacaggtgacagaactggaggatgagctgacagcggccgaggatgccaagctgcgtctggaggtgactgtgcaggctctcaagactcagcatgagcgtgacctgcagggccgtgatgaggctggtgaagagaggcggaggcagctggccaagcaggtattgtcacacagaaggccacagggtgccagtccagctggggtatgccatggtgtgtacaggcagcaagaagggcagcaaggggtctccccgacccacccaccactctgtctcctccacccgccgaccactcagtatctccccaacccttccactgctcagtgtctccccacccacctgccactcggtgtctccccacctgcctgccactcagtatttctgccagtctctcgtgccagccaaaccatcttcctcccacaaaaccatcttcctattccccaacccattaacctgccatgacccattaacccacacacatatcctgttgacctgttgctgtacccaatcatacatcctccatccaccacacaaaccattcacccatccatctgccaccccatctattcaactaccctaaccacccacatacagcctctcccccaaccagcgttgtgtccaactactgctccatccacccagtgactcccttccaacccatctcctctccccaacccaacccctcccctatttacccaaccccagcccctcagcaccccctgctgactccacttagtcactgactcactgacctgctcatccgccctcccctccatccacatccttccccaatccagtcagtcatcgctccctcgcttccttgtttgttccattgctctctccctccctgcatcgttcattcattactcgttcagtccaggaacttcccatgtctcccctctactaggtggtgaggggcaggggcagctctgggtgtcagaaagaccccgctggagccatgtaggcaacagacttggggtggagggtgctagaagctggggaggcagggaagagaggtgaacaggtgacctaaggccaggggtctctgcagggttttgtctctgctagcccctttgacttagacatggctgagtgtccaagacttggccctgggggcactggggaaccatgggagggctatgagcaggatcagctctggagacgtgttggaatgggctggaggggagagatgagaggctagaaaggaggcttaggtgagatgggggactgagctggggcagtagggatagagaggagaccaagtaaagagagtcagggagtgagaggagcggggcttgcagcctgggcaggagctccagggcagacatccatgtccctagcacacagagggaggctgggcttcctgtgtctgacccggtccctcctgacctcctctccagctgagagatgcagaggtggagcgggatgaggagcggaagcagcgcactctggccgtggctgcccgcaagaagctggagggagagctggaggagctgaaggctcagatggcctctgccggccagggcaaggaggaggcggtgaagcagcttcgcaagatgcaggtaagagccggcgtgagctgcagggaggggaggctttggtgtcttcaagccccaaccatcactccagggtctaaggctagctcggacccctcgctctcaacccacaggcagcatccgcatgggtcagcacctttataaacatccatgccccagaggctggcttccttcttcttctattttacatttctttcatttaaaatgctgcacttttaagtcaaatttcctcatttttttgtttgtttctttgtttgttcagttggtttttttttttttgagacagtctcattctgtcacccaggctggagtgcagcgacgtgatctcagctcacagcaactctgcctcccaggttcaagcagttctcctgcctcagcctcctgagtagctgggattacaggcgtgcgccataatttttgtatttttagtagagacaaggttttgccatgttggccaggctggtctcgatctcttggcctcaagtgatccacccgcccccatggttttgtttttgaagtgaaaataccatatggttttttggccagacacagtggctcacacctgtaatcccaccactttgggaggccaagatgggcagatcacctgaggtcaggagttcaataccagcctggccaatatggtgaaaccctgtttctactaaaaatacaagaattagccaggcatggtggcacgcacctgtggtctcagctactcaggaggctgaggcaggagaattgcttgaatccgggaggcagtggttgcagtgagttgagatcccaccagtgcactccagcctgggtgacagagcgagactgtctcaaaaaagtaaagatagaaataaaataaataaatcaacagtaggcaaactgaggctcagagaggggcagtggctggctcacagtcacccagcaaggatatggccaagttgtaattcaaacccatgtctatctaacttgaagccaggctccatcaggcttccagctgccttctagttctcagccaggtcaacctcctcccttgaggaccagagtgggagaggctggctcagggtcacacagcaagtggctttatacacaggagcccaggtctgcagggttcggagagttccctgcttgttcacgggagctgaggagccccgtcggtctggcaagggggtggaggagttccctgtgctgtgtggccaggctgagcccatctacctattccgttccacccaggcccagatgaaggagctatggcgggaggtggaggagacacgcacctcccgggaggagatcttctcccagaatcgggaaagtgaaaagcgcctcaagggcctggaggctgaggtgctgcggctgcaggaggtgaggctggggtaggctgggccctgggacaggaagctgggaggtgggcaaggctaaccttgaggtccctggatgtgaagctggggaggtgggcggggctaaccacagggtccctggatgtgaagctggggaggtgggcggggctaaccacagggtccctggatgtgaagctggggaggtgggcggggctaaccacagggtcccagggtgtaaggctcgggaggtgggtgtgtcttaccatgtggcctgcaatgccagcctaagagcagggattttgtcttagggcactagggagccatggaaagatccagaacagaggatgggcagggtcagctctgtagcagttgaactggagtggggagattggagtcacaaaggctgtgggagtgggagtgggagaggggagagagagagagattgagaaagagagagagaaccctgagccagggccaaggggatgcagaggacggagaaggcagtcagaaggcaggagggagaaggctatggtgaggggggccggaggaggggaggagagcactgggggtctggcccggtgattgggggaccctggaggagaggcaggtttgagaggaggacctgtgtgcagtaaaaggtggagagggtgaggggcctgggggttgggctgcaagaggtgagcacaggtcaggggctcaggagacagatttaggagacatctgtaggttgcagctcattccagggttacccagggacagcatgagaaaaaagccaagagccttgaggtgtgagggacagagaaaggggtgagacccgtgcccagattgcttctcctcacacccaccggccacccctccatcatcacaggaactggccgcctcggaccgtgctcggcggcaggcccagcaggaccgggatgagatggcagatgaggtggccaatggtaaccttagcaagtaagtgccccaagggtctgaaggctgaggtactgcgtctgcaggaggtgaagctggggtaggctggaggtggctgggctctgggacaggaaactgggaggtgggcggggttaacctcggggcccctggggtgtgaggctggggagatgcgtggggctaaccacagggtcctgtagtgtgaggcaaggcaccctcctctgaccatcctgtcctttcatccccacgccttcctgtctccctagggcagccattctggaggagaagcgtcagctggaggggcgcctggggcagttggaggaagagctggaggaggagcagagcaactcggagctgctcaatgaccgctaccgcaagctgctcctgcaggtgagcgtgattgaccgcccccaccagcctcagtccccattgacctgggaccgtaaccttcagtcctcttattcaacaaatatagaaaggggatatttgagttgggttttgaaggttgaataggagttcttaaaagggttgaaaggcatgattcacttgtatttctgaggggtttcttcagggctaaatccaaagatgaattatgtggggaaacagacatgggccagcaagtgtgatcatggaagtctcctgggcccagtagagagagagaaaagactttctgcaggagtcataagaaaacatttggaaaaagagacatttggctgggggttttaaagcataagttggagttcagcagagggagaaaagcatgttttcctttgcatatttatttataaatattttctgaggattccggtggcccagatcctattccgggttatgctggggacctggagatggttaatactaagcctctgccctcaaacacgtcttagtctaaaggaggaaatagaccatcccaatacagagatacaagtgaaaatggaggaaacacgggcactgtgggaacctagaagggactaccaacctagcctggaggatagaggccatcagagaaggcttcctggtggaggtgatgccttgagagatcttaaaggaagtgtaagagtttgccaagaagacaacagagtgatgggatttccaaggacaaaccaatgtctgcattcttcattagtttttttctaattttttttttttttttttgaggtggagtctccctctgttgcccaagctggagtgcagtggtgctatctcggctcactgcaacctctgcctcccaggttcaagcgattctcctgattctccaattttctctacaaaatatttaaaaattagccaggtgcagtggtgcatgcctgtagtccaactacctgggaggctgaggagggaggatcgcttcagcctgggagattgaggctgcagtgagctatgattgtgtcactgcactccagcctgggtgactggatgacagagtgagaccctgtctcaaaaaaaaaaggtaataattatatgctcaacagttatgtgtagtaagactactttttaaatggagagaatggggaaaatatgcaaaatgttttaacctactttaattgatggtgatagtattagcactgtttttctgagacattgagtttataatgtgggataaagtaaatgatcaaagatgggatactatgtcatctactacgtccttgacatcagggtactcagcaccaaagaaccttgatatagttgtcctagagaagagattaagtttttttttttttttttttttaaaaacaggccaggtgtggccgggcgcggtggctcacgcctgtaatcccagaactttgggaggccgaggcgggcagatcacgaggtcaggagatcaagaccatcctggctaacacagtgaaaccccgtctctactaaaaatacaaaaaattagccgggcatggtggcatgtacctgtagtcccagctactcgggaggctgaggcaggagaatggcatgaacccgggaggcagagcttgcagtaagccgagatcgcaccactgcactccagcctgggcgacagagcaagactccatctcaaaacaaaaaacaaaaaaacaaaacaaaaaaaacaggccaggtatggtggctcatgcctgtaatctcagcactttgggaggccaaggtggaaggatcgcttgagcccaggtgtttgagaccagcctgggcaacacagtgagaccccatctctacaaaaaatatatgtgaaataaaaagagaaaagaaattacgtttagtggggcgcagtgggtcacgcctggaatcccagcacttttggtggattgcttttagcgtaggagctccagaccagcttggatgacatggcaaaactccatccctacacaaaattgaaaaattagctgggtgtggtggtgcacacctatagtcccagctacccaggaggctgagttgggaggatcacctgagcccagggaggtcgaagctgcagtgagccatgattgcaccactgcactccagcctgggcaacatagtgagaccctgtctcaaaaagaaaagtgataaattatgtttaaaaaatagtttaagccaggcgcagtggctcatgcctataatcctagcactttgggaggctgaggcgggtagatcatgaggtcaggagttcaagaccagcctggccaacatggtgaaaccccgtctctactaaaaatacaaaaactagccaggcgtgatggcgggcacctgtagtccagctactcgggaggctggggcagagaattgcttgaacccaggaggcggaggttgcagtgatctgagatcgtgccactacactccagcctgggtgacagagcgagactttgtctcaaaaaaaaaaaaaaagtttaaaaacaaaactaagcaaacccctgtagttctcaatttgacttcatcatattcacgtgaactggtgatgtattttatacagatccagtctctctgaccacccaaaaggcctagaaacagggaacccagtagcaatgagtatccctatatccacgttgtgatctggaaatgctgtttccctctaaaagaaactggggctggctgggcgcagtggctcacacctgtaatcctagctccttggaaggctaaggcaggaggattgcttgagcccaggagtttgagaccagcctgagcaacccagtaagaccccgtctctacaaaaaaaaaaattagccaggtgcgatggcgggcacgcctgcggccccagctactctgagggctgaggtaggaggattgcctggatccgggaagcagaggttgtagtgagccagaattgtgccactccactccagcctgggcaacagagtgagaccctgtctcaaaaaaaagaaaaagaaaagaagagaaatgaaactggagcttcttccgaagtggctgattccagatctggagcaggcaatgaacaagagtaacccagaacattttgcgatacccattagcaggaaagatagtatagttatgtcaagagcacgtagaagtcaacgtgaagagcctcgcgctggcccaaagtggggcaagttgagcttcaatgaggaaaataattgcaactgatttaatcccttgaaatctgtttaaattcaacagcaacgttttaaaaaaatattaattagttgctgtgttagttccctagggccaccataatgaattaccacaaacacagtagcttaaagcaacaggaatgtattctctctgtttttttttgtttgtttgtttgtttgagatggagtctcgctctgtcacccagactggagtgccgtggtgtgatcttggctcactgcaacctctgcctcccggattcaagtgattctcctgcctcagcctcccaagtagctgggactacaagcatgcaccaccatgcctggctaatatttgtatttttaatagggagggggtttcaccatgttggccaggctgctctcaaactcctgacctcgtgatccgcccgcctcggcctcccaaagtgctgggattacagacgtgagccaccgcgcccggccaggaatgtattctctcgtggtcctggaggccagaggtctgaaatcaaggtgtgggcagggttggttcctcttgttcatgcctctcccctggcttcccgtgggtgctggcagtccctgctgtttcttcatctgtagatgtgtcattgcaatctctgcctttaactttacaaggcattttcccatctttgtggctctgtctcatctcctctttttttttttttttttttttttgagacagagtctcgctcttgtcgcctaggctggagtgcaatgggctgatcttagctcactgcaaccttcacctcccgggttcaagcgattctcctgcctcaacctcccgagtagctggattacaggcgcccaccaccacatctggctaattttttttgtatttttagtagtgatggcatttcaccatgttggccaggctggtctcgaactcctgatgtcaggtgatccgctgcctcagcctcccaaattgctgggattacaggtgtgagccaccattgcctggccctcatctcctcttaaaaggacaccagccgtatcagatttgaggcccaccctaatccagtgtgacctcgcgttaatcaattacaactgcaaagatcctatttccaactaaggtcacattccgaggttctgagtggacatgaattttgcgtgggagtctattcaccccatgggtgcatggggagggcatgggggaggggcatggagcttccgtgccctcctgggagcgccaccctccaggtactgcacatgttcagcttccagaagctgcccaaaccctgtcctcttgggccttttatggagacgtcactggataggtgtgattaacaaccacgtagaaatgtgattggacaaaaagggtccgatctaaacccagcgaggcctgtctgttcagattcttcctggcttctctatgcagcattccttccccctctgaaatgagggtcctgtgatccacagtcaggttagagtttctgccttgtgcaggtgaaagagggggcaggaggaggttagagagagaggttctgtttactctaaaagggctatgcaaattatgatcaaggaaccatggacaaaacccaacacacacacaaacacacacacatacacacacacacacatgcacacatgaagtatatacgcaaagcaatatcacaggtacaaattcccttgaaaattcacaaataaggccaagcgcggtggctcacacctgtaatcccagcactctgggaggccgaggctggcaggagttcaagatcagcctgaccaatatggtgaacccctgtctctactaaaaatacaaaaattagccaggcgtggtggcgggtgcctgtagtcccagctactcagcagggtgaggcagaagaatagcttgaacccaggaggcagaggttacagtgagccgagatcgagccactgcactccagcctaggcaacagagcgagactccatctaaaaaaaaaaaaaagaaaagaaaaaagaaaattcacaaataagacagaaagatcgggtgcagtggctcatgcctgtaatcccagcactttgggaagctgaagcaggtagattgcttgagaccaagagttcaagaccagccaggacaacaaagtgagaccctgtccctaccaaaaacaacaacaacaacaaaactatcagggcatgatggtgtgcacctgtagttccagctagtcaggaggctgaggccggagaatcgcttgagcccaggagtttgatgctgcagtgagctatgattgtgccactgcactccagtttggacaagagtgagaccctgtctccagaaaacaaaaaacaaaaaagaaagaaagaaagaaagaataaagtccctggacacagctgccaatttccaggaaacacagaggagagacaaataaatgctgaattagaccgtaagtgtgtgatcagaaaaatccagacagagaggaactctacaaggctaacaacctacattcttcaacagataaattgtaagaaataggctgggggcagtggctcacatctgtgattccagcactttgggaggccgaggcgggcagatcacctgaggtcaggagtttgagaccagcctgcccaacatggagaaatcccatctctacaaaaaaatacaaaaatgagccggacgtggtggtgtgtgcctgtagtcccacatacttgggaggctgaggccggagaatcacttgatcctgggaggcagaggttgcagtgagctgagattgcaccactgcactccagccttggtgacagagcaagactccatctcaaaaaaaaaaaaaaaaaaaaaaaaattttaaaggaataaaagggatggaggagggaactgcaggttaaaagagacttaaaagacatatatctggccgggcgtgatggctcacgcctataatcctagcagtttgggagaccgaggtgggtggatcacttgaggtcaggagtttgagaccagcctggccaacatggtaaaaccccatctctactaaaaatacaaaaattagccaggtgtggtggtgcgtgcctgtaatcccagctactcaggaggctgaggcaagaaaatcgcttgaccccgggaggcagagattgcagtgagccgagatcgtgccactacactccagcctgggtgacagagtgagactgtgtctcaaaacaaacaaaaacaaacaaacaacaacaacaacaaacccacatacatctacttttttaaatgggtaggattcaactataggatctagggatgcatctgtgtgtaataaaactaaagacatacaaggaaatgaggacctgagaagtcaggataacatgatattttggggagaaggaagaggttttcattaggagtagtgcatgaaagggcttctggaagggcaaagttctctttcttgaccaaggtgctactgacagtgatgtctgccttttgttaactcatgatgcctgtgcgggatgacacccacacacatccatgttcagagacaggaagcagcagggtcatggggctgaaacggttctcatctccagctgctggaataatcaggaacactcccataatgttcttggttgagaattactgtgctaataaaactagcagaatatttattactgattttttttatttgattaatgtttggctctctgtatcaccattttatttcacaataaaaagtttgaggccgggcgtggtggctcacacctgtaatcccagcactttgggaggctgaggtgggtggatcacttgaggtcaggagttcgagaccagcctgaccaacatggagaaaccccatctctacaaaaaatacaaaaattagccagttgtggtggcaggcacctgtaattccagctactcaagaggctgaggcaggagaatcgcttgaacctgggaggcagaggttgcagtgagctgagatcgtgccactgcactccagcctgggcgacagagcaagacatggtttctaaataaataataaaataaaataaaattagcaggggtgatggtgtacgcctgtgatctcatctactcaggaggctgaagtgggaggatcacttaagcttgggagtttgaggctgcagtgagctgggatttcaccagctgggcaacggctgtgctccagcctgggcaacagaacaaaactgtctcaaaaaaagttttttaagttaaaaaaaaaaaaccccacaaaggagaatatgctaattacccagtcattgtgtccctgcgagggtaaaataaagtatgaatcagactgggtctgactcacttccatgtacccagcagaaggcctcgctcagagtacgagctgaataaataaacgggaactattattaggggtgtgtttacacattttccacgtagcagctactgtttattgaggccgtgtttctcaaaatgctcctgcatataacacctgagatgcccgttataagtgcagattcccagactccactttggtattgctgagtcagaatctctgaagggtgagacccagatgtctgcatttttttcccaagctcccccagatgatcctggtgcaaacaaaagtgtgataacccttagaatggactcattcacagtcagaagtagaatttatgacatttaaacaagtttgtgatggtctcgtggacttattaaagtaagcagaaaactatccaaaatgttaagacccagggctggcagtgctgtgggtgacaagtcaataaactattaataaaaatacaagctaacatctgttgagtatttagtatgtttcaggctctgtgctatgcgtgtgacaatcatcagtgcacttaattctcagaggtgcctggatttacctaccaccttccctctgagactccaccatgacatccttccttcccctcctgctacaggtagagtcactgaccacagagctgtcagctgagcgcagtttctcagccaaggcagagagcgggcggcagcagctggaacggcagatccaggagctacggggacgcctgggtgaggaggatgctggggcccgtgcccgccacaagatgaccattgctgcccttgagtctaagttggcccaggctgaggagcagctagagcaagagaccaggtaggtgagagcggaggccacaggagaaaggtgacctccacattctggttggtgagaggaaggaggctgtgttacaaacacgtggtttagaaacatccaaaagacatcatcatagtaatgactgctggcctggcatggtggctcacgcctgtaatcccagcactttgggaggcagaagcgggaggatcccttgaggccaggagttttcagaccagtctgggcaacatagcaagacctcatctctaaaaaaaaaaaaaaaaaaaaaaaagccaggtgtgttagcgtgtgcctgtagtcccagctgctcaagagcctgagataagaagatagcttaagcccaggagtttgaggctgcagtgagctgtgatcacaacactgcactccagcctgagtaacagtggaagaccttgtctctaaaaaaaaaaaaaacagccaggcacagtggctcacacctgtaatcccagcactttgggaggccaaggcgggcagatcatttgaaggcaggagtttgagaccagcctagccaacatggtgaaaccccatctctaccaaaaaacaccaaaattagctgggtgtggtggctcatgcctgtagtcccagttactggggaggctgaggcaggagtattgcttgaactcaggagatagaggttgcagtgagccgagattgcgccactgccctccagcctgggtgacagagccagactccatttaaaaaaaaaaaagaaagaaaaaaagaaaagaaaaagatgccaggcacggtggctcacgcctgtaatcccagcactttgggaggctgaggcgggcagatcacctgaggtcgggagttcgagaccagcctgaccaacatggagaaactgcgtctctactaaaaatacaaaaaattagccgggcgtggtggcacgtgcctgtaatcccagctactcgggaggctgaggcaggagaatcgcttgaacccaggaggcggaggttgtggtgagccaagatcacgccattgcactccagcttagcaacaagagtgaaactccgcctcaaaaagaaaaaaaaagaaaaagaaaaagaaaaaacaaacaaagtgtgtaaatatatgtaaatatttaaatgattgctgattttctgtatcatttaggatgctttgggctgcaagtaactgcagtctcactacgagtattatttacgtaataacgtgccagttagttatagctgaattacaaactactctgaaacttagtggcttaaaacaacaaccatttattattgcttatgagtctttggctagtaagttctgctcatttgggcttggtgggcttcactcatcatccgctcagttgagggtcagctagatggatttgctaatcttggctgggctttcattttttttttcttttttcttttcaagaacagcatgagtggtattggctgggcttgcataactcttaaggctttgcctaggacaactaagctaacttgtctctgctctatgtggcctctcatcctccaggaggctagcccaggattgttcatatgacagagtcaaggttctaagagcaagggaaagtgctaaagactccttgaggcctgcacttggaactggtactgtgtcacttctgccatatcctattaaccaaagcaagtcactcagcccgctcagattcaaaggaatggggaaatagatatgactgtttgataggagcaactgcaaagtcatattgccaagggtatggatacagaaaggggtgagaactgggaccatctgttgtatcagtctagcacaaagaggaatgtctttttttcaagtgataagaagtctagagctaggcagccaaaagatggtagggctctggatcaacatctgtgttgttttttagtcttttcctcatggtcataaaatggctgcaattgcaccaagaaccatacccacagacatccatgttcagagacaggaagcagcagtagtatggggctgaaagagtttccatctccagttgctggaatgaccaagaatgcccccataacattcctagttgagaactgctgtgctaataaaatgaacagaatatttattactaagcctaatacctttcactcttccaatacaatagattttcctattgctcagtactattcagcaacaataattacaacaatactaatagttcctatttattgaggatttactatatatcaggtgttggactacttgtatatacctgtatgataccacataatccctgtgagagaaagaccattgttatcctattttgcatgtagaaaaactgaggctgagatgggctataaatgtaggatacttgacttgctattcatcatctgcacattatctcatggggaggaatgttattatattatacatcaaatttatataaggttcccttttgtattcattcattcaacaaacaaatattaagagtgtactgttggggccaggcatggtggctcacgcctgtaatcccagcactttgggaggccaaggcgggcagatcacttgagatcaggaattcaagaccaacctagccaacctgatgaaaccccgtctctaccaaaaatacaaaaattagccgggagtagtaatggacacctgtaatcccagctactcaggaggctgaggtaggagaatcacttgaacctgggaagtggaggttgcagtgagccgagatcacaccactgcactctagcctgggcaacagagcaagactccgactccaaaaaaagaggagtgtactgtttaccttcccatgtgctggtcactgaaaaaattagacgtaccatggaagtatgtctaattacctccatggtatgtctaataccatgtctggtgggattccccaaggtgaaagactcatgagctggacatggcaatgaaggcctatgaactagaagggttgaagggacacagatgaagaagaagctggaataccctgagatgtagtggtttgggaagggtatctagaggaggaggcacttgagctggagctgacaagaatgggatttccagggcttagagtcccaagtcagttggcagctttgtgggaaagtctgggagacatcagggcatttggaggaggagtgtggttggttctgagagtctgggacccaggagagggatcagggagacagggaggtaaatgaggcttgaagcacacagagccttgaatactgggccacggaactctgttctgtgggcagtggggagccctgggggcaatggggagccatgggaaggctgtgggctggggagggacacggccagctctaggtatagaaagatctctctggggctaaggtgggaatggatcagaggagggagactggaagctgggaggtttggaaggagtctggaatgatggtccaagcagaacaagatgaggcctgagctggggctggggctgtgaagatgaacaagagaggatgaagaagagaaagcagggggcagaaggaatgaagcggaggctatgggtggtggcaggggaagaagacactgtttggagctaaggcctggtgactgagggaatattggctttttggaggaagatgctaaattcgttgtggaacttgatgagagtgaaaggcctcagggacaggcagaaggaaacggccccagaggtgcatgagacaagtggttctcagtccacagggtcacccaggggccccagggcttatgggaactgtagcttgaggtctatggggacccctgctccattatacaaatgaggaaactgaggttccgagggagtagatgagttgcttaaagtcaccctgcaccaggtgcagtggctcatgcctgtaatccccacactttgggaggctgaggcaggaggatcacttgaacccaggagttcaagaccagcctgggcaacatggcgagaccccatctctacaaaaataaaaattaaaaattagcccagcatgatggcacacacctgtagtcctagctactcgggacactgaggtgggaggatcgcttgagcccaggacattgaggctgcagtgagccatgatcacaccattgcactcctgtctgggcaacagagcaaggccctttctcagaagaataataaagtcaccctgggagcaaagaatgaccagatgattcttagctgaagaagtctcagccgggcgcagtggctcacgcctgtaatcccagcactttgggaggccgaggcgggcggatcatctgaggttgggagttcgagaccagcctgaccaacatggagaaaccctgtctctactaaaaatacaaaattagccaggtgtggtggcacatgcctgtaatcccagctgctcgggaggctgaggcaggaacaattgcttgaacccaggatgcagaggttgcggtgagctggagatcgtgcctttgcactccagcctgggcaacaagagtgaaactctgtctcaaaaaaaaagaagtctctctccttcatccttttccactgcttagtgccttcccactcgcccccagccctgtgccttcctctcagcacatctggggctgttgtatccagggtggctgtcaagcaatcccgattgctagaggtcccatcacatggacttcaccccagatgtgatggtccatgcaggagaggacaggtgtaagggcagaaagagtgttccctcccgctctgaagattcaagtctgctgaaataaactgacaataaatagattaacaaaataaaaggctacaaatatattaatgtgcatgaacacaggagccatgcaaaatataagactttttatacagggtcagatggttgaggcttaagtatcctctttataggggagagagacaaaaaggatgtattcaattgtgagagatagtaaatgattttcaggggaaaatgaatgggcccaaagagtaaactgtagtttgtaaatgatcctctttggaaactgaataggaccaaacatatacttattataactcacaacatcataggaaacaggtatgtgaggtgtcctagtagaagccaaggacatggatgccgaggagaaggcagcctgcatgtcagtgtttggcctcagtaaactgtgggaaccacttaggggttaggaaagagggaagaagccaatccaagaacaaggtgacagccactgcatgagtctatggggacaaaatcctaggttgagcccctctactgagactcctcctcatccctctcttcagagagcgcatcctctctggaaagctggtgcgcagagctgagaagcggcttaaagaggtggtgctccaggtggaggaggagcggagggtggctgaccagctccgggaccaggtaagcagctggcatcattagggagcagtggagagtgtgaccactggctgagaaattgcacaggctgtctccagaggcaatgagctcccatcacaagaagcaatgtgcaggtgctggactggaactgaatgcagataccatcttggcacttggcacatcagcagagggttggaatcagtgagtttgcaattcataaatgctggcatctagaaagggccctgtagggagctgaggaagccagggcaagggaagaagttaaaccctacccagaagctagaccaggactagcttctatgtaccaggcactgtgctaaagacataacatttactgtgtttaattcttatcagaatggtagaaggaaggtgctattatttaccctcttatttatgtgaggaaactgaggtacagaaaggtgaagtaacttgctcaaaattatttagctggtaagaggtggggtcagtattcaaacctcagcactctagccccagagtgtgtgttcttgattacttactgagcagttactgtgtcataagcaactgctttttaaaaaatacatatttgcatttcctcactagtcccatttcacagatgaagaaactgaaactttaagaggatatattttgcatcagagtcacagagatagagcctggatcagatcccaggtctgtctggacagagtccctctgcccttaaaagctcagctgtgctttattcgccattcattccacaaacaattattgagcacctgctatgtgccagacactgtggtaggcattagggatatggatgtgaacgaaacagaggaagtccctgccctcatggagctcacattttctgcataggatgagacgtaataaacctgtaaacaagcagataattacagattgtgacaagggctatgaagaaaaaaagtgaagagagaggaagacacagaggattggggaatcctcttcaggttgggagatcaggaagaactctttgagaaggtgacatttaaattgatacctgaagggtgaaaaagagccagtcagagggaacagcaagtataaaggccttgaagaatagaaatacgtttggtgagttcagaacaaaaagcagattagtatggtctagataaacatctgttgttattttagtcctggtctagcttcttggtagagtttaacttcttccctcactttggctgcctcagctccctacaagggcccttcctagatgccagaatttataaattgcgaagtcattgattccaaccctctgctgatgtgccaagtgccaggatggtatctgcactcacttccagtccagcacctgcacgttgcttcttgtgatgggagctcattgactccagaaaatgtgggataggaaggctgaacgataagaaatgaggtcagatcatgtatgttccctccctgaagagagaggtggtagggtctggggaggatctcagtgaagttggtctggacagtgggtttatgggaagagagaactggacaagaaaaagaccctgtggggcctggaatgccaggctgaggggctggaaccttgtcccgggggtactggggagccatgaaaggattgtgagcaggagggtctgggtcagctctgggtataggaagacctttctgaggccatgtaggagacaacctggaggggagagactggaggtcagggtagaggctggcatgagggatttaggagaaaagaacaaggcctaaacagagagcagaggatggggcagagagagtcagggggcagtagggatggggcagtagtgggctgttggagagggagggagtgatgacagtacctggagatataacccagtccccctgcttccatcaagctggagaagggaaaccttcgagtcaagcagctgaagcggcagctggaggaggccgaggaggaggcatcccgggctcaggccggccgccggaggctgcagcgtgagctggaagatgtcacagagtcggccgagtccatgaaccgtgaagtgaccacactgaggaaccggcttcggtatggtcatcccacgtacaggcctgacgggtggggagcaccctaactccataaaccccagggacgcgaggccgtgccaggggcaacaacagggggaaatgggatccacgggggtgtggggctgtgggagcagcggctgtgttgcgggagagccaaatccaggtaacttctttcttcccacacccatttctccctgtcatctctgtgccctcctttcccaccgtgcaccaccacctttctctcctttcctcctctctgtgtgtccttcatctctctctgccccccattgcttctgcccgtctccctccatttctcttgatctcatccctctcttcccccttattttgttctctctcttcctatctctctctctctccccctcatctctctctctcctccccctttctcctcccctcccctcccctcatttcatctctgtatcctggtctctcctccccacagacgcggccccctcaccttcaccacccgcacggtgcgccaggtcttccgactagaggagggcgtggcatccgacgaggaggcagaggaagcacagcctgggtctgggccatccccggagcctgaggggtccccaccagcccacccccagtgaccctaccctgtccccagatgcactaacagatggggcccagcccccttcctccctggaccccacgggcccctgtcccaggaaccccgccctctgacttcttgccctttggaaatggtgcagcactctggcatttatcacccccacctgggtcccctgcaacctcccatcaaaggatgacccctaaacacagaggagcggggcaggcagggaggcaatgactggagctaccttgcttgttgggggactgggtacagttggcaagctgtgtttccatcagctccctgtcctcctttcttccctcgttattgatctatagacattaggaagggagtgagacggctcctccaccatcctcagccagtgcaacccattccctctgcttctctctctctctctctctctccctccctctccttccctaccctctcaccatctttcttggcctctctgagggtctctctgtgcatctttttaggaatctcgctctcactctctacgtagccactctccttcccccatttctgcgtccacccctgaactcctgagcgacagaagccccaggcctccaccagccttgaacccttgcaaaggggcaggacaaggggacccctctcactcctgctgctgcccatgctctgccctcccttctggttgctctgagggttcggagcttccctctgggactaaaggagtgtcctttaccctcccagcctccaggctctggcagaaataaactccaacccgactggaccatctctgtggctgtgtgtgttcctgcagggggtctctgatggggcaggatgggcacaggctgcttcagcctgctagggcagcaggtcaggcagcctgctggttagaatgacacctgcgtgggtatacagggacatcctgtggatcaggcgcttcataactcctttcctcctgactccagtgtataatggaaatattccctgcattatacagatgagggaacagtctcagagcagcagcatccctcactccacgcccccagtgagtgctagaaggggtgttgcactcgggccaactcttaagttttgcaaaataaatgacaggcctgctgcagtggctcatacctgtgatcccagtgcttcgggaggctgaggtgggaggatcacttgagcccagggggtggaggctgcagtgagctatgattgcatcactgcactgtagcatgggtgaagagtgagatcctgtcccaaaagcaaaacaaaacaaaaagacagccgtggtcgtttgtgctgcgtgctgtgctaagcacacagtttatcttaacccttacatagcactacaggtagagatttcattgcactccagtgcctagaacagtgtctggcacacagcaggcattcactcaatatttgctgaataactaagtgatgcccctcccacccttttagagtggtggaaacaggctcagagaggctgagtgacttgcccaaggacacacagctactaagaagttgaaacagtttgaacccagacagtctggcctcagagtcagcacatatagaggctgagccctcagcccctgaccccaccttggggacccaggtctgtctctctcgtgggaactaggcaccctcgtgtgggggctcacgttcgtcagactgagtcctcagtgacttttcagttagaggtgtggatccccatttttactatcagggaaactgaggcaggtgcttgccctaaataaggtgcaagccgtggagcagatgtcacgatcaccaaagcccatcctccccttttttaaaaaattgagaaagggtctcactctgtcacccaggctggagtgcggtggcacaatcatagctccctgcagcctcgacctcccaggctcaagcgatcctctcgcctcagcctccagagtagctgggactacagatgccaccacacctggctaattttattttattttttgtaaagacagggtctctcttgtgttgcccagcctggtcttgaactcctggcctcaagcgatcttcctgcgtccttggcctcccaaagtgcttggattactggcctgagccactgtgcccagcaatagggccccactctagaagtcccaatccctctgtgcgccccagccgcaatcaggagactttccgaacaggcacacaggaggccatttttaaatgaaaaggaaacgtttattttggtggggagtgagggtgggtgggaagggggcatgacactttttctttggggagaggggggtgacatgcggcagcttctgcattgggcggttcatgcacccagggtgggcgtgggggaggcttggggaaggggccacgccgacccctccctccctgccctgcgggtgggctgagaagacccgccattagcaccagagttggacgatttgcagacctcccctccccacactgtctccgaaccccgcccccatccctgagagcgccccctcaccactccccccaccagcgacaggctaggcccgccccgcccacatttgagtgagagaaacttattgctctgtgtgtgtgtgtgtgtgtgttggggagggtgagccgcggagctcaggaagaccccccgccattcattcctccccaatcgccccgccccctggcccgtgtccgtgcgttcccggagcgcaggaggggtgcgacatgcgtgtggggggcgcgtcatgcagcgcatgcgtgtaggtgcaggcaccctggcggccggggggaaaagggggagccggacttggaaagagtccctttagctcgctctctccctccccgaatcccacactattgacttgggggatggggtgggaggggaggagaatcacgttttgtagaagtttatcatgattgtggttattttgaaaagctgaactcaaaagctgggtacgtgtggcggactggcgagcagggggagacgttgggaagaggtcagtaccctttggaaaagaccctcaccccctttccccgcctccttcggctttcgtgaaggtcaggggaaacgggggggcttgttaaagaagttgaaccctttggcaatataatcagtccccaccccgtaccctggtgtctggagcccctagccctttgccccgcccccaccaaaacccgccccacccctcacccctgcttcaccagggtttagggtccgagggaaggatgggggggactcaaaatgccccttgcataggaatcgttgcatcgagaatcgtgctcagtgacgccccccatccaccctcgggtggggggttcctgaggccgtgggagcagagggagggaggtggctaattccgtgggaccccggctccaaaaggggggtccgctaaagagtctgggaccggtgtggtctctgggcttgggggaggtagcgcatccttgagccaggataggaggtgggaaatgattttccacccgcgagcgtgacgcggtgaggaccgctggggaaggggggctgggatcccagccgagctgggtgttgtcggttcccaatcttctgatactccagtgttcctcccttcgggaacagcctctgtgatcatctgtggactactttaaatggaaacactcttaacctaaataaaccgtgtcctagccaagcagcgatgcctgcacttatcggcttctgtacaaaatgcgtattagagacaaaacttttaaaacaagtgtttgtcctcatactgcctcaaaccttagcacaccaccaaaggtacaaatacaaccctctgggaaacactggtgtctgtgaagagggtacctttggggcaccatctcagggaagagactcagggttaggcgtaagacaaagagggtgcttggggagggtctggttccctggaattgcagacaggttgcgcctatcttggaagttctagcatcaagggaacctgggctggacaagtctgttagggctttggggatatgggtgcggaacaggcctgaggctttgggggtgtccaagaaatgtcagttgtgggaaggatttggagcatcccaaaggctgaatttgagctgaaaagagctgggtcaagtcttggaggtttgagaagtgctgggacgcagttcagggaatttggtgggggtgtttggggtggcaggagtggggagggagggtggttcagggagcctctgtgtgcagaggttaagtcgcaggagtgtgtggggattgggagatgtggcgtgccagggtcagtctcagaattctgggtgcaggtctcatgtcctgggaatggagggagatagtcggggaatttcgtgtgctagggccagatcatcccaggaattctgggataggaggtctgagtccatgcagcaagaatagaggcgagcaggtccctgggggaaggggcggatgagagggtgaaattcaccagaggaattctcctaaaggctgagggagcaggtccaaagcccgccccgccctcccaccacctgagctcaactcggccccgccctcccgccacctgagctcaactccgatctggggcttgggtaactgttcctccttcccctacactgtttctagtttctggtttgttttctcctaatcaacgcacagggttggttgtcctcctggggtgaaggatgggaaggctggagaccttaaaggccagcccgacccccgggaggtgccacccccttcccagagtgcctgcccctcaaacccgcgcatgcggcccctggcggcttattgctgaggtggacttggagtgggggctccaggttagggaaggcatgcagtgtgtggggggaggtgccccaagatgtaactggcataatttggacttatttacacaagttgatggcagggggatgtcctatggctcgtggagacctgagaaggctttttttggggagggaagagttggggggacgggctgtggcccctctctccatcctgggggcccaggttgggggtgaggggcccgggggtgtctgctggcatcgtcatctcggttgcatattattaatgactttttgattttttttaaaaaaacccttttccccaccccccacccccagctcctttgaccttcttcccggtcacccccgagtccccccacaggggggaggggagcgctaaaggatggagggcagggtcgggggagcgcggcgggcggcccggggagagccagggggggtggcaaggggcgcgaggcgcagggacaccccgctcaggcccgcgatgctgctgaggctgcgggatttctcgtaacctggggggtggggaggtgtgcagacacaggggggaagcacgaagatggggtgcagggaagggtcagacagagagacccaaggcagggagaaagagacagagagagaaagaaatggaaggggaggacaacagatacccagagagacagagaaggcaagacagacagagtcaggcagacagagacacaaaaggacggatgacaagagacagatggacagagatggaccaaggagatggagagagaaagtgaacaaatcggggagtcagtcaacatcgatgagaaagggggagacatcggggaggggggagagactccggattaggaggcaggttggtgcccaccgagcctcccccgccccattcccaccacagtccaccgcccttccccccctccactggtcccctcacctgaggcaaaaggtggggggcagcaaggcgggatggtgggcggcaggggcgtggggaggggctgggtggaatgcatgtgggagcagccagcggagagggcagggaacggtgcggccgccgtagcggggctgggggctgacctagttgtagggaaagagagcaggcagggggtggggtctgcaagggggctgagtggagcgaagctggcagtgcccttggggaatccgatgagaactccaggagcagtgggggggggtggggggggagggaggctcctccagaagattctaaggacggggtcgggggtggggggcggtgaggcggagggctggggagagggacatctttaaagggtccaagaaggctctgagcttctgacgggtgcgggaaggctctcacaggcatctcacagctaatgggactcaagatccagcaacagtgtgtgtggtttctgcaaagcctggggctgcctgcagggttctgcacccccgcagggagctctgtggcttttccaggcaacgctaagggagctgtctggacaaaaggtgtcttgatcgtaggagggagggcttggggggagatttgaagcccagtgtcttggggacaccccctcccagccattcccaattgctaacctggggggaaggggcgggggggaccgaaagtctcgcgaggtctcaggcggtgacaagagctggggacagaaatacacagagtcacgggggtggggagaggatggtcaggggaaaccccccaacacagcctcactgttggggggatggagaaacgccgccgggatcatttcctcctctctggtgttttccgcgggaggggagcagtgaaatggggggcggctgagacatcaaatatggaaggagcttccgggctggctggggagggggaggggaggaggaaggatgggaggagggagagttctggggaggagtgggagccagtgatcaggtgagggcagatgtaggagggaggagcaggggtggaggacaagcctggaggaaaggagggtcttgggaggaccataggggacaattagggagggaagaagcctggcgcagtggctcagacctgtaatcccaacactttgggaggccaaggcaagcagatcacttgagtccaggagttcgagaccagcctggccaacaaaaccccatctctactaaaaatccaaaaattagccgggtgtggtggcaggcacctgtaattccagctactctggaggctgacgcaggagagtcacttgaacctgggaggcagaggctgcagtgaaccaagattgcgccactgcactccagcctgggcgacagagcgagaccccatttcaaaaacaaaaacgaaagggttgggaagggaaggttgtggtaggagagactcttgggggaaggagcatggggggcaataggccaaaggggtcttgtgggagggagggttgtggggctgaaggacagcaaggaaaaggcttggggagggctggagggggaaggatccagggcaccagggatagaagcttcagccaaccccatcagctccagccatgatttgagttcaatgaatggattttggcatcataggcaagagaagcagggacctcccccacccagccacccccaccccaatcctccctcacccataggcccacaccctctccccctcaatcccataggggcccctctagacctgggggtggggaacagaggaaggtaaaggactgggagtgggtgcaagcagggggaggagttagataggagcagggaggggagtgggggggtaatgagctggaaatggacaatgacggggaggttacaaaaaggagaggtgggggggatggaacaagaggagccagacagtcccccctctggactaggagcccggaagcctggggtctcggcccttgtgctctgtggcctggggtggtgggttggtcatggccttccctgaatgtctgtgaaacacaggggtttaggtgaggccattcctggaagccccccaggttcccctatggcatctccttaggctgtggacagggatcctttaggatgtgtctctgcatttctaaagaagattccacagacggctgttgaatgaatgcatgatggatcacataccttcaggtggcttcccttcacgtttaagataaagtcccgcctcctcaccatggccgaaaatccgtcctgatctttctccctggactccagcagccctctccccttggccactgggatcagcctcactgtgctccttgctgtcccttgaacaagccaagctcatcctccaccccctcccccagggaagctcagggcctgtgcacttgctgtttcttctgcctgcctggcccttttcaccctccaggttctgtgtcacctcctcaaaaagtcctttgcagaactccttttcttcccccagagatggggtcttactctgtccccccaggctggagcaccatggcacaatcatggctcactgcagcctcccagactcctgggctcagacagtcctcccacctcagcctcccaagtagctgggtctacaggcatgcaccaccacacctaagttttttggttttgaggaaatggtcttgctctgttgcccaggctggtctcaaatttctaggctcaaatgatactcccaccttggcctcccaaagtgctggggttataggcggcagccactgtgcccagccagacctctttaactgaagtggccagagtaatagtcttgttcttttatctttatcttaattgcttcttttcttcttcttcttcttcttcttttttttgagagggagtctcactctatttgtagcccaggctggagtgcagtggtgtgatcttggctcactgcaacctccacctcccgggttcaagtgattctcctaccccagcctcccaagtagctgggactacaggtgcccaccaccacgcatggctaatttttgtatttttagtagagatggggtttcaccatgttggccaggctggtctcgaactcctgacctcaagtgatccactgtcctcggcctcccaaagtgctgggattacagatgtgagccacccccgccgcccagccttaattgcttattttctgcttcttcctatgagcggctggaaacttttcctgtaaaaggccagatagtaaatctctttggctataggggctgtatagtctttgtcccaattattccactctgctgtcgtggcttaacatggttgtgttccaataaagctttgtttacaaaaacagatgctgaaagatcaggccctcaggctggagttagtttgcggaccccttacaatctggagactgtaaaccgtgatggcagattcacgctttgttttatcccaaatttgtagtgcctgcaactgtgttctcaagaatcagttgtggccatgggtggtggctcatgcctgtaatcttagcacttcgggaggccaaggcaggaggactgcttgagcccaggagttcaagaccaacctggccaacatagcgagaccccaacacttgaatccaggaggcggaggttgcagtgagccgagattgcaccattgcactccagcccaggtgacatagcaagacagtctcaaaaaaaaaaaaaaaaaaaaaaagaatcagttgctgaaacagtgaatgaatggattgaatacatgaatgaaaggagctaggagttggcttggattgttacaaggattaaagaatatatgttaaattcctagcatgtggtaggtacttggtgatatttgctgaatgattcgtctactaaatagcaccactgtcttatccccctcacttctgcatggccggcagcccccagtctgtcccttctgatccctgaccccgactctctcggcctcgtcccttcctctccatcctcacagccctggccccagctcacgcttccacctgtcacctcagcctcctaacttccagcctcccacctccagtccatcctcacaagaccccagagctgcccctcccagctcacctgcctcctccccaagcccctagacaaggtggcagcctctcagcccggtgcctgcctcatatctacctgagaatcctccctccacagtctagtctcctaagctctgtcctgcggttcccttcaaccgttcctgtcgatgggatttcttcctctgcgtgtggtcagaactcctgctcaaccttaaggccccactgcagatatcgagtcttccctgatgcccggccccatcccctgggagtttctagtgttcctctcactgtctgtgctccctccattttagcatacatcgcctcaaaccatgactttctaggtccgtgtctgcctcctgctccaaagcggaagctcctgggggcatggtttttgttcacggttgaactccccatgcccagtacctgggatgcgtgggtgctgtctaagcgctggctgaattcacaggggcatggacggatggctgagcctttctctccccattctgcacccagaagtgttctgggtatgccctccgttttcctgattgaatttttaaaaaaaaccctaggaccaaggagggaggcagagatgttgatgggggtgaggatggggtcggtcgtgagggcaggtgcagtgtgggaggcagggttgagttagttcgggggttagtgaggagcagggtgagtcctgggtaggtgggtgtggggtcagtgtcaggagctgggggttaactgggtgcagctgcttgcagtgagggggccgaagtctcggtcagtgggggctgcatgttctcagaagggttagtcaggcaggagtggggagtctgggggtccgggggatcagagggtgggggctacttaccccggggggagggggttcgtccactagggggatatccaggccgcggcgttggcgttgaggtcgggcaagaagcttggggggcctggcttacgccagtcttgggggggcagtgggggagcaccagtggctgggggtgggggaagaggccagagagttggggggaatggacatggaataaagacaggtgaagggtcagtggtgaggaaacttggggcgggggtacagggaagatctgggagggaggcagtttggggccaagggaagggggaagggaagtccaccgcctcctcccccatccccctctcctccctcccctgggcaggggagagagagggagggtcccaggggatcagtagggggggcacctcaccttttcggatggagccatcaggggaaggggcatagtcggtgaggaggaagcaggctcggtcccggctatagcggccacggcttccaggcgtgatggggctcttgtcttccggggacatggcaggctggtcaatggctgggcagtcctcgtgggcaagcgcagctgctgccggatccccattggggcgaggatctgcatcccaagggggtcagacagagagacaaaggagagagtgaggtgcggtgaacacgcggtggggcaagatgtctgcgaggagcagatgctgggatggtcggcggatgtttggcactggaagtggagattcaagggcagggtgatgggaaggagtggccaggagggtggcagggggcacagctgggagagggtatcaagggggcgcggctggggggtgatcatgggggttgagtgctgggaagggcgactgcagttgggaagggtggtctggacagggagttggacagattgtggtggtgcagggaggtgttgagagctgggatgtggtggtggtgccaggtgtggggtgccaggaagggtaggactggggtgggatgctgtttaaagatatggtctggagctggccacattggctcatgcctataatcccagcactttgtgaggctgaggtgggagaattgcttgaggccatgagtttgagaccagccctggcaacatagcaaaactccatctctacaaaaaatagaaaaattagctgggtatagtagtacacgcctatagtcccagctactctgcaggctgaggcaggaggatcacttgaaactgggaggtcggcctgcagtgagccataatagtttcactgcttcagcctgggtgatagagtgagaccctgtctccaaaaaagataaaagataaaagatgccaggcgtggtggcttacgcctgtaatcccagcactttgggaggccgaggtgggtagatcacttaaggtcaggagttcgagaccagcctggccaacatggtgaaaccccgtctctactaaaaatacaaaaattagctgggcacagtggcgggcgcctgtaatcccagctactccggaggctgaggtaggtgaatcacttgaacccgggaggcggaggttgcagtgagccaagatgtttccactgcactccggcctgggagacagagtgagactccgtcttggaataagaaaaaaaaaagagagagatggttgcggatgaagcaagctgggtgtcggggagaagatgaggcagtgttggggggtggttggctggagcaaacttcagggggcttggctggggtaggggtagcgggtggaggcatggctggagaggatgtggcaagctaggaagtggctgttcagggaagagtgctgggctctgggaagggcaccaaggggaagggctaggttaggtgagagatgggaggtgggacgtgggggtcccctaggctctgactccagctatttttaactggtgtgaaactgggtcagcggctgagggagcaagatgggggccaagtggcccagctccctttcttgacctacttaaggcggggcagtgcaggggggggccaccagcctctccttcctcctagactcccaagccactgcctctgaggcatagacaccccctgggggaggaacacacacagaagcacaggtaactttcttctccctcatctctcgcttgtctcttcctctgagcagcacctctctggatctctctttgggaccctcccaggctgcccacagcaaagccgactgaccaggccctggtttccgttctgccctgggggatctgccctggcctgactctccgttttgaagtctgtctgcctcttgggcttgctgtcattagaacccaaactctctgccgctgaccgcccccacctccgcccaaaatctacatcccatctctctctggtctccatgacaatctctcggtttctgactccccgcctcagaccctatcggcttcagtctctcttccctcagggctgtctcccggatgctcagatgctgctacgttccctggggttctgcctcgggtctgcctgtgattcctgtgagaccctctttctgtgtctctctgagccccacgctcctccgggtccctctctctgcacagctgatgacactgcctctgcctcgccagcccctctgaatatcttgcaaatctgtttctccccaaaactctttcccatgaaacctatgtctctgtgtgattatctgtgcctccttcttcgcctgagctcctgctgttggtttttttctccctcacctcttcgacgccaaccaccccaggttctctgaaccccggcagctacctccccagtcctccccgggtctccacctgtgcccccgatccctgacgcccaggctcacctgcccggttgatctcaatcacctcctcctgagccaacgggcaaggctcgccgggggctggcagaggaggcagccccatgatccccagcccacccgctccccccctgagcagcccggggtgcgtgtggggccccgctgggtaggccccggccacagtcacccccatggagggtggggtgatgggtggcggcgggctgatgcccccgctgccgtggtgcgggtggggcgggggtggcgggggtgggtcaggcttgcagtagttgggcgagcccggttgcgggggccgggggatgtgtttgttcttcttcttgggcagcttctgcttggccatggccagcgaatagtacatgccaaagttgttgacaatgacgggcacaggcatggcgatggtcagcacccccgccagggcacacagcgccccgaccagcatccccgaccacgtcttggggtacatgtctccatagcccagggtcgtcatggtgaccacagcccaccagaagccaatggggatgttcttgaagtaggtgtggttggagcccaggatgtcatcggggtcggcgccaatgcgctcagcgtagtaaatcatggtggcgaagatgagcacccccagggccaggaagatgatgagcagcaggaactcgttggtgctggcgcggagcgtgtgtcccagcacgcgcagccccacgaagtgccgggtcagcttgaagatgcgcaggatgcggacgaagcggaccacccgcaggaagcccagcacgtctttggcggccttggagctgaggcccgagaggcccacctcgagatagaagggcaggatggccacacagtcgatgatgttgaggctgcttttaagaaactccaccttgtctgggcagaaggtgatgcgcatgaggaactcgaaggtgaaccagaccacgcacaccccctccacgtaggtcaggaagggctccgtctccacctccacgttggtgatgttctccggaggtgccccggggatcggggaggcctgggtcaccgtcttgttgctaatatggatgaagccctcatgggtttccaggcagaaggtggtgatggagatgaggatgaagaagagggaggcgaaggccacatactgcagggcagggagggagagagagggggagaggtgacctaggcatcaggttggccataacatccagaagacccttccagtgcccccttccccagcctcctgggcccaaactctgggcaaaatccaggtgtctcagccctgtggctccatcacttccagaatcccattctcccctctaaagctagcaaaaagggagagaaaggaacagaggcagttggagaagagctggccccagcagacgcagcagatgggcagcttctttccttggaaacatttctggccccttgctgtttcctagaccacctccccccaccctcctgttccctgtgtcctatttcagggccccccagcagggtccacgggttctgctgtgggacgggagccgccaggcctaagatcacacatcctgtgtgtctcggaggctttagggctcagcttggagctgggcagacgggaagggagaaggcgggcagggaggcagaatcgtgaggtggttaagagtcggcgagcctgggcatgaatctggcttttaacctgtcaaaactgggcaaggagactgagctttctgaaccagaagtttgtagtgggattgttgtgaggattaaattagatgagcgtacgaaggacttggctccaaacacagtgcttggagcagtgcctggaacacagtaagaagacctgagctgttgttagggtatgcaggcagcagttagttggggggcaaggtcaaggcctcacccagagaggacagggcagtggtggtgccacagaggggaggtgggggtccgggcccttaagggaggaggggttgaagggttaagcctgcaaaaatggaagaggagataaaagaggagagtcaggcagggtttagggccctgaagaggaaggagagtcactggcctggacattgtgggaaaaggcagagccagggccaaagagaagttagggcatttgccaaaggggcagagaatgaggggtgaagggtcctgagccatttcaagatgggggataaccagagtcctgccacacagtgatgtgggttttgatgaaggcctagaagaggagggagtggggtcagggtcttggagaaggaaagcaatgggccaggcccctagagatgtcatgggctttatcagatatgcagaggggtgggaggggagaggagtgcattggagagggaaggaagacaggtgttatagtaaagagagggttttaatcctgcgggtagtggaggagggagggcatggggagttttgctattaatcaggggcacagagcacggggaggccactgctggaccacagagaggaccttggactttggggtgggccaagggccagcactgtccctctgtgcaccccccttcctccacaggggttgggctctgggcttgacttcactgaggtgcagagctgggaagtagtgggtggagagtttcggggccacagagaggaccctggacgttggggtgggctgggggccggcgcaggtcctctctgaactccccccccacccccaccttcgcttctctgcagtggtttaagaggccagaggccttcgcagagcgcatgcctagttccccgccccctccgagccgggcgcgcggcgctagctgcggcaccgcagtgggggcgggccagccgggccggggggcggggcgcacggcggccagtaccgcggacagctcccccgccgcagtgcgcagccgcagcggctaggggccgtcttaaccccttccgggccggagcctattcaacgcgcagccgcagtgttgctgctttccggcgggaggccaagggccaagagtctaattaactccttccctcccagggcacagggaaaggtgggcacccgccgcagtgcgcagctgcagaggctggacggcgtcgggctggtttaaccccttactccagagtgtgtcaaaagcagaaggggtaggagggcatggagtctctgtaagaaggaaaggagtgattacgaggaagggggcgggggcagggggctgtagggtcggaccctccactttgctttggcctcagctcccaactctctcaagccatatcactgggaggctggaaagggctcggcacaccttggacacccaaaacacattggcggagtaaatgagtatctcccgtagctgtcccgaacacctagcctgaccatcacagaagaactctaacttcatcccgctcctcatctcagcacccttcaatggggtcacaggagagaagggcgccccggccatgggggaaggagccgctcagtgtcttgagggggcatccagggccatgtcccttccgcacctcctcttccccacctccccccatccaaccccaaatctcgccaactcagcgctttctggggaccaaactttatgcggtggctccaggcgtccccccgctccctcccccggcgcgaatgcggcactgcggctccgcgtccttcccggctcaggacgcggcacggtggggggagggggccaagacctgctcctctgtgtttgggtacccaggagcccaggagggggtcttgggatcgctcttatttcccccatttccaattgcccccattttgcactgccccccttttccaccacattctccctccggggtccccgggacagggaggaagttagtaggaggaaatggttcaggagagaacccagggggagggtagtcatttagcctaggaagttatggatgcttgaggaaagttttctgggagcgatggagagagctttggggaaaatctagaatttggagagagagagaaggctctttggttcactttgatggagggggacagactgaggggctaggttctgggttttgcacggcggggggggaggttcgagaaaggaagagggcaggtggaaggaatcccagggcaaggtagaaagaattgtaagttattttgagatgaaagttttagggctgatgacttgaggggcctcccagggtttgaggttagaaaaagttctagagcaggagggaaagtcacttagactaggaaacgggctgtgggggctttggatggggggagtcccagggatagagagtgcactgtgcagttaaaatgatggagaggagaagctgcgaggatctatggaggaggaagaacaattctggaggacatgtgagggttctggagaggaaaggcatatgatgggggcatgggatgcttctggaggcactgaggaggagtgtgaaaggcttgggggaagtctggagctttatggggaaagtccttgagatgggagttggcgtggaggttgaagagtgttaaacacagagtgaacacagagggggcctggaggttccaacggagaagatgccccaagactcagtattgcagtgagggggaggtgaaaatgtccaggcaagaacaagtggaggtttagaggggtccagaaggctgtgaggttggggtgggggagttttctgagactctgagagcagaagatactgcaggaagggagtggaaaaaataatcagaagattcaaacttggagagagaggtcttctgggagacgggccacggggtgaatcggggaggtgctgggagagactgagagttgaatagggggccccagagagtctggagaaggcagggaaagtgggggtcagggctcacagggcctaggagaatttgagggctgagaagggatgtcttctgaggggctggggaaggtccaagaaaccaagggctggacggtgaccaagagtagtgagaagagatttgatggggcccaggagacatgagggttggggagggtctcagaggagcccaggaaaggtggggaccgggttgttcagagaagcacgggagattcacggtctggaggaagtgtctaagcgtctagggtggccttggcgggggagggggaactttggaggggtctggaagagcccgaaggttggagatccgtctttggaggatctgggggatggctgcgagaggggggtgtgttcggaggagcccaggagactcaggattggggaagaggcttctaggagactgagaagcctagagggacccggagggttggagctggggcgctcctgggagactgggggcgcctggagaggcgggggtggggtggatgggggccccgagagcgcgctcaccctggcagcccgcgacgagtaggggtcctcgaagagcgcccacacgcggggctgccagcggcgccaccatgtgccgcccgcgccgcccgcgccccctggcggccccccggcgccgccgcccgcgtcctggaagcagaggcgcttgagctcgccgcccgctccgtccaggccgccgccgcccgcgcccgcctcgtcgtccaggcctccgtcgtgggcgcctgcggcgttggcggcgttggcggcgcccgcggggtcgggcgcctcgaaggagtcgagcgcctcctcagcgtcgcgatgctgccggtaggtcatccagcagcaggcctccacgtcggtctcgtcgatgccccagaagccgagctcctcctcaaacaggggcccgcacacgtcggctgggcagtgcagcttgccggtgcggtagtagttgagcacgtacgcgaagactcccgggtgccggtcaaagaagaactcgtcggcgcccgggtcgtagtcgaagcgtgccgccgcctcgggctccgtcaggccggccagccgcgtccccggcagggtgcgcagcgtcgagcggtacgtctcatggcgcacgccgcccacgttgatcacgatcttgccgctgtcgccaccgccgccgccgtgccgccccatggccgccgccggcagcccggggcatggctcggcgcgccggtccccgggcccgcggggtgccggggggcccgccggggacgcggcggggccgggctgcgcaggctgctgctgctgcggcggcagcggtggcggcggcggggactcgggcggctgcggcggtggcgccggctgctgcttgctggccccctggcgcccgcggaaggacgagacgcagactgagctcagcattggacggggggcggggcgggaggggcggggacgcaggggcggggacacggggggagagaccgacgggattgggtgggaggaggagcgaggtagcgggggcgtggcttaggggagaggaaccaaactgattggcctgggggaggtggggcggggctgtggctgggaggagtggggcgggcactctaacgcgacccagctggacgagtcggggccgccaatgagacggagcgattggctctttctaagagagcagggaggaggggcggggcggggcgtcaagggaggcgggaccggttactactaattgtgttcggcagcactggtagccaggggaaggcggggctagatacgatagagagagaccttactgaactgaaaaaagtgcgggcggggtagagggaggaggggacacatccaagctatttaaagacgcccgactggcctggaggggcggggccaccatgagagaggccgtcctgattgggctgagaaaggggcggagagaaacaaaacagatcgcacgccctcacctaaaacaccgctaggcaggacctggtggggaggagcattgcttggaagagacagggccgcagaaagtagaaacggtccagatgagactgcatggggcgggaactagagatggaggactttcccgcgcaagggggacaggctggactgaaagaggacacgggaagaacaaagacttagactcggtgagaaggtgttgaaacttgagagagtcctggaaacccgagagggtctggataggcctaagggagggagcggggctgaggctccaaggcgggcctggttagtcggggctgggcccggagaatgagtgtccggatggatgagtggtactgaggaaggtgagtggggtcgacaaatagaaaacgtcttgaggcagggcgcagtggctcacgcctgtaacgccagcactttgcgaggctgaggtgggtggatcatttgaggtcaggagttcgagaccagcccggccaaaatggtgaagccccgcctctactaaaaatacaaaaattagtcgggcgtggttgtgggtgcctgtagtcccagctagtcgggaggttgaggcaggagaatcgcttgaacctgggaagtagaggttgcaatgagtcgagatcgcaccactccactccagcctgggcgacagagcgagactctgtgtcaaaaaataaataaataaaagaaaaagaaaacgtcttgaatgggcggtaggaaagagagactaaggaaggagcggggcttgagggtcttgaaagcaaccagggtaggcgagggcagggcagggctaagggagggtagaggaacgggagaggtggatcccaggggaacaatgagactacaaagagtacaaagctactgggctggatggaggggagggacctggaacggggagtcttcgggatcagaagacctgggagagggcactgcctaaaggtcacagggtctcaaagggcgaggcgagaacttctaacgaacgctacaccgcggcggactgcagattggaggaccgagggtagatgaggactggtgaggagggggcacgcaaggaggcagagaggacgggagaggggagaggccaaagcgccaggaagcaccgtcaagactgaggcaatataggcaggaccgataaaaaatggggtgggctaggagtctcagaggtcgggttctggggaagaatggagtgaggggcggggccagaaaaaggggaccgcctcggagcgggccgtccccgccccctgggcggtcgtaggctccgagaggcagagcgcaggctcagggggctggggcggggccagcggctgcggctggggctgcggagggaggaggcggcgcctgcgggagcgaagggggcgggtcagggggctgcgggcgccctcgggcagcacagtttctggcccgccgcttcctgctgcaggtgcggcggctgattcgtatcgcctcccaaccccatcccacccccgctcccgtttctgggtttcttggcgtctctttttctcccttcttgagtatttgtgccgccgtctctgttcccacccctctgagtctccgacccctcgtttgtaaatctgccctcctgggtctctgattctgtccccctccttctgagtctttgctcctcttctctctaggcctcagtctctcctccctggtgtctcagtccccgcccccccaccccagctcccccgagtctctttctcttggtttctgtaccattttatcaggggtgtgcctctctgtctggggctctgtaccgcactccctgggtcttgtgtccctgtcctctactccctccccgcaacccgctttgtcctgcctcctctctgggtctctgccctttcatctgagtctgtctcctccttgctctctgacaacctctttcccctcccccttcttcttccccttctccccatctctggtgtatttccccctccttcttccccttctccccatctctggtgtatttccccctccttcttccccttctccccatctctggtgtatttccccctccttcttccccttctccccatctctggtgtatttccccctcttccgtctctttccctcctctgtctctgctctttctcttgctggctctctgttcttctctctctccctctaagtttctgcctcttcactttctctatgtcccctccctgagtctctattcctcctatgtttcaccttcttctgggtctctctctttctaggtctctgtctccacttcctggggaccctgtccccctctctctgggtctccgttcctttttctcagaccccccatcaccctctctaacccccgtcctagctgggactgcgtcactgcagagagagttgcagaagtggggcctgtcctgcagcccaggaaggtcgttgccctcactccccagacccagggctctccattgcacccaatccatcatgtccttcagcttctgatggaatccaagagggcacagaaaagacataggtacttcctaccccttccccgaattctggtgcacccccaggcagaagcagagaatcctgaggtgagggactgggctggggctggatgaggctcctgggcaattgggggtggggtggtggaggcaggagcaagggctgggtaggcactatgggctaggtaaggacctcggtcgccatcctcctccacactcccccctcaaccctgcttttcccttctgcttttcacagcagccaggcacggtatcaagtggctaaatcagcgtttttttgcagaggtcagaagtgtgggagaaggtgggggctgtggggaaaaggggctggaataaggaggaatgtgcgatgcgactcaggattagaggccatgggaggggaagaggcagcgggccgggagtagcaggctggtccgtccacattccatcaggccctgggaaacttggatgccagcactccctcatggccctccacagaccccaccagggtctatgggaggatttgtgagcctggagtctccacccacccattagagaggagggggcttctggaagcttcatgagggctccaaatactggacactcagctatgttcacagaccaggaggaagtagactcgactcttgactagggacaccaggaggggagaggccaacgtctgtctcgttttcagttcctttccccacccctgctcctcccaatccatccgttcccaggccctcaagacacaaaattcctgaaagctccaactcccatctacgtcatcttcggcgtcccctgataaccctccctcccccattaccccaggccctggaattggggaagggtcttccctccctgacttctacgaccccttccttgttcctctgcccccattcccacccggttccattcggagccttggtctctggacaccaaaggtgaaaatgtgaggactctctgcctacgatccttcgtcccctaaaaccctccaagtaccttggccccgaaagctcagagtcgaggggaatctccccgctataatctttgggtccctggatcccaagtcccccgtctccaaaactaggattcgggctgtcttaccgcccccggaccctgagccttcgccccctcccccgtactcaccccaagtcgaggcgaggtggggatgggggaatccggggctcgagatggggggaggggtgacccagccccggcagctctgggcagcaagaggctgcagaggggggagtgacatcaccgccggaggaggggcagcaccgctcccccaacccaggggcttcaagctccgcctttatggcggaccccggggtcctggaatgccaaggcagagaggagaaacaggagacgaggtccgagggaacggtatccccgccccttagaacaggaactggtaaacccttaccaattacagccacccccgactgccacctgtggctgccgtcgcgacctgtcgcctcccacgcatgttgtggctgcgcccgcccccgtcagggcgtgaccacggcgtggactacaacgaccgtgatgctccacggagccaggagcctttgacgaaaggcagcgtaggcgagggccttcatgggactcgtagtacaaggcccatcacaagggtgcgccgtggagaaaaggggtgatacccttcgcctccctctcttcctcaactccgtgggtccatgcacaaagctttctcttcaaaaagtacgctctgaaaagaagcaacctaggcaggttcgttcaatggaaatattggatttttactgagtagcgctagctctgctacccggtgcgcatgcgcatcacctgggcggcacccgcggtactgcgcctgcgcggtctcgcgccttcccaggtccgctccgcgagggcgagcgcgcgccagtcccactcgtgcgccgctcttcatgtccccgcggtcgaagacggtcacatacgcccccaagaaaacgtcgccgaggatccacacaggtactggaggcgaagcgatgtccaaggcccggaagccggacaagcagaggcggacgtcaccctgagcaaactgcaaggcgacaaggcggcaactgggtgtccaggccgcaggaaccaccatttccctgggagtccgtgctctctccgcccccaaccccggggacaagaaatgtttctgtggccccttccggccctagtgatgtccaactaccagctccaccctctcaactccagtcatattacatcactgtggcgtcattatgacggacacctacctggatgacgtaatcctgggccgtgagattaaaccagacccccccaatgaggagtgagactgcggggagctttgggatttctgagcaccggatgatgtactggtggaggagaggaacaagtgaagatgggagattcctgctctgctcaaatcccgtccgtggctccccagtgccatggagtaatgttcatattgagcacctgggtattcagcaccgtgtgtggacagccctgttgcctaggctcctctcatctagtcccaaacaaaactgcattatcatctcccccaacaaccccccccccactcccacccctacttcaccatccactgagccacttagcatagacacttgggaagtatctttgcttcctcccaccactctctggcatgtcacttaagaagcccagtcccctctgtcctggatacgctctagctacctgcttcccatcctcaggccgcagtgttcgccatggaattgccatcatcttccccaggacacacccaccagagactgggacctcacctccccagccagcaaggggattcccccaatggctgcatgcagggcccggatctcctcagtgggtcctacgatgacaggtgtgcctgtatccaggatggcagcacagccctgggcacagagagtcagccgtgagcccaccttcacactgagggggaaggaagcagtcattagaggcagggtcctaggagtccaggcctccagctccagacccaggagaccaagtccctcaccgctccatgtggatctgccagtaggcggggactgtgactggcacgaaggtgaggggtgggatgtagtgtgccgggtctgagccccccaggaccagctctcctccatcagccacttcagggtccctgcaggggcagagtgtagaggtcattgtcgccagccctcccccgccagccctaggaatggccagggatgggacttcctgccaattgggtcatttttggggttctagttggggcagtggaatgcaggcagggccgagatgttgggactggaaacaagaaatgaagggaaatggtgcttttcttgatggaagttaggactttaggatgatggatacttcctgaagtggagaggagacttcttcatttggctgtggaaggtagagcttttgggggaaattcctgagctgaatatcatagtaaccaagcagaccagtggagtctcagaattggctcgaaggtgtgacttgtacaggagtggggtggcttcctgggaaggtgcatagactttctgaattgcctgttgtggtatctagaaaggtgttagacttcctgagctggctgagagtgatgggaacggggatggaaacttcctggaagatgtaaatgagtgggacctaccgagagctaggtggaacttcttgagtgggttggatgtcagggtaactgagtgggcattggactgtgtgtgatgggccctgggagggaaagtgaagacttctcgggtggtgggtgggacttctgagcataagattgaccttcctaccaggtgggtggggcttcgtgaattcaatcaggcatttcctgacttctggtcagtgttctcaaatgggatttgagctttatggtgaagagaaggttcctgagtatttggttgggtggggcatagaatttcctagtttgattttgaaactcagcatattgaactgttggtgagtttctttaatatgtcttaagttgtcacttaagctctggggcttatgaatagggttgaggtgtttcttctgttaggtaggtggctacttcctgaatgaagggtgggattgattttttttttttttttttttttttggagacggtctctctctgtcacccagactggagagcagtggtgcgatctcggctcactgcaacctccacctcccggattcaagcaattctcctgcctcagcctctcaagtagctgggattacaggcatgtgccaccgcacccagctaatttttatagttttagtacagatggggtttcaccatgttagccaggctggtctggaactcttgacttcaggtgatcaatctgcctcagcctcccaaattgctgggattacgggcatgagccaccgtgcctgaactgggactttctttatggagtaagagacttcctgaaggagggcctcacttccttctgaggaataggactcatagataggtgcaccctccccagcacctgttgaagtaaaaggagaagacaggcttatccaatagcccctgctccaccagtacatccagcgggggccgaactccttccacagacagaatgggaaaaccgaggcccaatatcccatcggggcgggaaacagtgaagaccaggctggattcccacagagcttccccgaaaatcacggatgcacccttgattccaccaatctaggggtagattgagatgtgaccagttacttttgggaggacaataaccacatgtcctgaggtctcccaaaccaaagcattaatcccaggtctggggacatctggacccaagcccccaactgcttagcaaactttgcctctggacttgagagaattcctatcccttcacccaggaacccctccccctccttgagaagccccatccatcggctcaggaagcccctgcacctcaagcccctccctaagccagatgatcttagacaacagggttctcccaggctcgaggcttcctggagtcaaaggccactcacagtcagcttgtcctcactcaggattccatctacccgcccagttccatactgaatggcaaacttggtcccactgggcttgaaggagctggaggcattgggattgaagcggtggtggaaccctaggtcagaagtcagagaggtgtcactgtgggaggggagctttccgaatgccttctgcccctttaaccttctgacctttgagggtgtcagaaaagaacagttcctcaaaaacctttgggaagctgaggcccagccccgccttctcccttcacccccattcagccttattctcccacatagaagctcacagcagggcacactgaagaagtggcatctcctggacgggacccagagattggaggagccagtgtcaaaggcaacagtgaagttttgtggaggcgttcccagcccaatttccccaaaatactgggcctgaggaggcaaaagaagagacagagtcaatgaagagtttggctcaagggcacaggagtgggggctgtgtagggctgtgactcacatccaggaatttggagagaggtaccgaggcaggcttgtccccaggggatggggcccccaacttggggagctctgctggttttccccatcccctcagtaggttcagggtcctgcgtccagggtggacttgacgaagagggatcctgtagggtatgaagatgatgagaattaggaagccgcccttcctggagaccctctaaaatagacttacccaaatggaatatgatgacaaattcaacatttccaaggcgctacaataggagtcattaccagaaaccctacaataacaacctccgggaaaccctagcacagaaaccatgatgacagatatccccaaagactttacaggaacaaaccatcccaaacagaacttcccaatggtatccaagtccttaaaataagccattcccagggaattgacattctcaaagttttcccaagaccctaacatgaaatctgacctttgcagaagccctcggatggtggcccttgcatgcttcagttcatgatgttggagactatttccccacccttgcggaaaaacgtaagcatcaaatcttaatttcacttttttttcctgcaacctctgcctcctgggttccagtgattctcctgcctcagcctcccgagtagctgggactacaggcgcgcaccaccacgcccagctaatttttgtatttttggttgagacggggtttcgcaatgttggccaggttgctctcgaactcctgacctcaggtgatccacctgcctcagcctcccaaagtgctgggattacaggtgtgagccaccgcgcccggctgagacagagtcttgctctgtcaccaggatggagtgcagtggtgtgatctcggctcactgccgcttttgcctcccaggttcaagtgattctcctgcctcagcctcctgagtagatgggattacaggcacgtgccaccagctaatttttgtagacagagtttcactgtgttggccaggatggtcttgatctctttacttcatgatctgcctgcctcggcctgagccacaacagcatgagccaccgtgcctggcctgaggaaagcttttctaagcatgaaggcaggatcaaaaatcatgggggaaaatattaataagtgtgactcaaaattgacacctgttggccaggcaccatggctcacgcctataatcccagcactgtgggaggcaaaagcaggcagattacttgagctcaggagttcgagaccagcctgggcaacatgttgaaacgctgtctctactaaaaatacaaaaattagccaggtgtggtggcacacacctataatcccagcttcttaggaggctgaagcgggaggattggttgagcccaggagttcaagtctacagctacagtgagctatgatcttgcaactgcactcccagcctgggcaacaaagcaagaccctgtatctaaaataaataaataaatacaataaataaattttaaacccttgtacttcccctctacatacacacacaaagctgtaaataaaggcaaggacaaaaaatctgggggaaataattataagttgtatattaagagttaatattcctaatatgcaaagagcttctacaaataaataacaagataacccagtcttgggagacagtttttcttgagtctctcacatgtctgcagagcactgacttgtcttttgaaggattttgtttagtgaacagccttggaagagagatagcatctctttctggagcaaagggaaggcaggcttatgatgccttataaaagatttaagctccctatgctcaaggttctattaatatcatgcaccacagtgcatgtgcaggtatcatctggccttcttcatttcatcttgtggaaacgggctcagaaaaataggccagctgtggtggctcatgcctgtaatcccagcaccatgagaggccgaggtgggaggattgcttgaggccaggagtttgagaccagcctggacaacatagtgagaccctgtctctacaaaaaataagaaagccaggtctggtagcacatgcctgtagtcctagctacttgggaggcccaggaattcaaggttacagtgagctataatcatgccactgcactccagcctgagcaacagaacaagaccctgtctcaaaaaagaaacaaaaaaagaaaaaagaaagaaaaaactggcacacgtactaatactcttgctactactattgctgggagtaataaactgccctttgtctctgacttgggagtcttgggtcttctatgagcagccatgaaactatggcaaactaacttcatagttcttgacgctcattaggaaaatggacaaaggacataaaattgcaaaagaagtacaaataaattctaaatacatggaaagatgtcatcaacagtcatcaaaaaaatacaaatgacaacagtgagaaaccttgtttcaccatacagattggcaaagaactgagaatacttattgttgattaggtttgcaaatgtgtatcaaatgctcgaaaattgtacccaccatttaacacaacccagaatttcatctataggagatcactggatgagtgcacagaggtgggtttatgaggctgtgcctaattttggaaactggagacagtccaatgatgaactgcctttgcaaaaactataagtgagaaaattaggacagtgaaagagatctgatctaaacaaccgctaccttgcctttaacttccaaactgcctttggtcattcctgggcttaggccaagctaactttgggagacagtttatagtttaaatggtaatagtccatccccaaaactaaaccacctttgtaaagctaatgaagtaccaccaggataggaggatgagaggagcatgaattctgctaaggtgcagacataaatgattaccagtcattattccagaggtcaaaatatttgcagcttccccaattactcctgcagattacatcactactgtagaacctgattggccttttgagactaagggtttttgcatttctggtgatgccacccagacctgccaaccagtcctgtggctccacccagaagcagactattttccaggcccctatgaatgattacatccttgaccaatcagcagcacccattcccaggcctgacaaactatccttgaaaaaccctggcctccaaatgttaggggaggctaatttgttgttttcattttgtttttttatgagatggagtctcactctgtcacccaggctggagtacattggcatgatctcagctcactgcaacctccaccccctgggttcaagtgattctcctccctcagcctcctaagtagctgggattacaggcaccaaccaccatactcagctagtttttctatttgtagtagagacggggtttcatcatgttggccaggctggtcttgaactcctaacctcaggtgatccacccgcctcggcctcccaaagtgctgggattataggcgtgagctgccatgcccacctctgatttgagtaataataaaactctggtctcctgctcagccagtggctcggcataaattaaactctttctctattgccgctttcctatcttgataaattggctgtatctgggcagcaggcagaaagaaccagctaggcggttacagtggccaacaatgggtacagcttagttctgctttggaacatacatagaatggaaccccatttgacctctaagaaggaggaagtagctgtctataccagtcattctcaaactttatttagcatgacccaaaatcacctacagcagtggtgttgggcaaatctttgtgtagaggctttgcaggccagacagtctctgtggtaactattcaaatctgtccagatagcatgaaagcaactgcagacaacagatgctatggaaatgaatgcgcatgctgactccagttttgttagagacagggtctcactctgttgcccaggctggagagcaatgacacgattgtggctcactgcagtctcaaactcctaggctcaaaggtcatcttgtctcagcctgccaagtagctggaatcaggcatatgccaccacatcctagctaatttttttttcattttttgtagagataagttcttgctaagttgcccaggctggtctcaaattcttggccccaagcaattctgcctcggccctgcaaagtgttggggttacaggcatgagccactacatctggcctagattccctttagcttatttgtaaaagggaaatagcacgcagggtttgaccctcaggctcagtgtttgccaagcccagactcagagggctggttcaaattcagatctcttaatttttaagtagatctgggatggggcttgagaatttgcatttctaacaaggtcctgggccatgctaatgctattggttttgagacaacattctgagactcactgttctttgcattgacttggaaaatgtccgtgatatattaggtttgcaaagcagatgaatagggaatgatgaattcattgaaccttacaccagcaacatctatactctcagagtcctgggagaatttcagattgtaaatccttacttattcaaagatcttactgaggtgggaggattacttgaggccaggagttcatgaccagtctaggaaacatagtgagaccccccatctctacaaaaaaagaaaatcttaaaaaaaagctggttaacaaacataatgtgcagtaatttttaaaataaattttatatttaatgatttttttgtagaaagagatggggtctcactatgttggccaggttggtcttgaactcttggcctcaagcaatcctccaggcctctgccttccatagtgctaggattacaggtgtgagccaccatggctggcctcatgcagtaattttttttttttttttttttgagatggagtctcgctctgttgcccagactggagtgcagtgccatgatcttggctcactgcaagctccgcctcccaggttcacgccattctcctgcctcagcctcctgagtacctgggactacaggcgcccaccaccacgcccgactaatttttttgtatttttagtagagttggggtttcaccatgttagccaggatggtctcgatctcctgaccttgtgatctacctgcctcggcctcccaaagagctgggattacaggcataaggcaccacgcccagcctgcagtaatatttttgtacccaattttagtcactccttggagcatgacaccctcactcacacctttgccctcacccctcatgactcagtctttgaaaggcacaagaacgagaagtggggaaaacactttccggaaaatacacccctccccctgcgaagagccccaaggggtaaggagaagagaagagaagaggggaagggagaaattggggaagcatcagaggtaaggtaggggagaacttcttgggtggggtccccaaaactggacttcttttttttttgagacaggacctcccttgtcgcccaggctagagtacagtagctcaatcatagctcactgcagcctcaaaaccctgggttcaaatggtcctcccacctcagcctcccaagtagctaagactacaggcacctgtcaccgtgcctggctgattttttttttctgtagagactgggggtctcactatgttgcccaagctagtcttgaactcctagcctcaagcagttctcctaccttggcctcccaaagtgctgagttgacagtggtgagccattgtgctcagacaaaaaaatagacttcttgaggcctaaacaatttggagggtgtgaatgtgggggagtcttagtttaaatgtcacatgccttggtctccaagatggcgggaatgtgtcacatgtctggagacccccataactggtcatcagagcttggagtgggatctgcagaggcctccaaaaaaacatatccagagaagaaggggagggttcctcactcaagagtcttagtgaaggccgggtgtggtggctcgcgcctgtaatcccagcactttgggaggccgaggcggacagatcgcgagttcaggagttcaagaccagcctggccaacatggtgaaaccccatctctactaaaaatacaaaaattagccaggcatggtggtgcgtgcctgtaatcccagctacttgggaagctgaggcaggagaatcgcttgaacccaggaggcggaggttgcagtgagccgagaccacgccactgcactccagcctggcaacagagtgagactccgtttcaaaaaaaaaaaaaaacaaaaaaaacaaaaaaagagtctcagtgttggaggatctgggacttaaaagggctctgggctggacatggtagttcacgtctgtaattccagcactttgggaagctgaggtgagaggattgctcgagcccaggacatggagaccagcctgcaaaacatagggataccctcttctttacaaaaaatttcaaaaattagctgggcatggtgacacatgcctgtagtcccagctacttgggaggctgaggtggaagaatggcttaagaccacgagtttgaggctgcagtgagccatgatcgcactactgcactccagcctgggtgacacagcaagacccaatctcaacaaataaataaataaaaagaaaaaaattattttaaaaaaggagctctgagccagacgtggtggctcacgcctgtaatcccagcactttgggaggctgaggtgggcagatcacctaaggtcgggagttcaagaccagcctgatcaacatggagaaaccccatctctactaaaaatacaaaattagccggggtggtgtggcacatgcctgtaatcccagctacttgggaggctgaggcaggagaatcgcttgaacccaggaggtggaggttgtggtgagccaagatcgtgccattgcactccagcctgggcaacaagagtgaaactctgtctcaaaaaaaataaataaataaaagggagctctgatcttaggagatgtcagagtagagccctcggggtgagagcccactttagagatctggaaagccaagaaagaagagtcaaggatcctgggtgccaggtttgggaatcactgaaccaggagccccagacttaaagggcaaaaagcagagaatccctcccaggtttgggggtggcaaatggggtcaccataccggatcagtgtggccccagcaggctccacattcagcagaggcagcagcagcagcaagggtagcagcagcagtggtggagacattgctggggagccgggtgtgaacccaggcttcctagttttctttcccctgtgactccaccctgtttatgccccacctcccggtttaggaggtgaccagaacacgaggtctctcagcaggtgacacagggggacaaggatgtttttgaagatttgtgcagagtatttgtgtagtgtcaacaaaagttgtatcctgtgtccttagtgctcctcattccctacttggggggtggtggtcgtggggtgtcctctgctgggactgcctcccaccccccatcctttagcctctgtcacttttacttctcactttcacatcacttttctgagactcattaaccacagtgtttccttggccaagtgggagggaccagcaggtgtctgtgaagggcctggggaagggagagaggaactgattataagcctgccctcccatatgaagtgggactgcctgcgtctgaggacccagactcttatttgtaggtgaagtatgtttcttgtaagcaacaaaacattgggtcttctttttcatccattcatccgttctatatctttttattcgagagtttagtccatttacattcaatgttgttcttgataaggacgtcctcctgacattttgttacttgttttctggttgttttgtagtattctcttctttctgtccttctttcatgttatttatttatttatttattcatttatttttgagacagaatctcattgtcgcccaggctggagtgccgtggtgcaatctcggctcactgcaacctctgcctcctggattcaagcgattctcgcctcagcctcccgagtagctgggactacaggcgcgtgccactgcacctggctaatttatgtatttttaatagagatttggtttcatgatgttggccatactgatctcaaactcctgacttcaggtgatccacccgcctcagcctcccagagtgctgggattacacatgtgagccaccacacctggcctctgttttccttttagagaagataattttccttggtcatatgatttaattttttgcttttttttttgtatctgttgtatgttttttgatttgaggttaccatgaggcttgcaaatattgtctttttttttttttttttttgagatggaatctcgctctgttacccaagctggagtgcagtggctcgatctcggctcactgcaagctctgcctcctgggttgacgccattctcctgcctcagcctccagggtagctgggactacaggtgcctgccaccacacctggctatttttttttttttttttttgtatatttagtagagacgaggtttcaccgtgttagccaggatggcctcgatctcctgacctcatgatccgcctgccttggcctcccaaagtgctggggttacaggcgtaagccactgtgccctgccataaatactatcttataacccattattttaagctgacaacataaacttaacactgtttgcataaacaaaccaacaaaccaacaaacaataagaaaattagtaaaaactctacaccttcactttgtccccaactttttaactttttgttgtttgtatttatatcttattgtactgtctatgtcttgaagcgttgttgtagttattatttttgattggttcatcctttagtttttctacttaagagttgttcacacaccatagttatactgttacaatacaccatgtttttctgtgtgcttactattagcagtgagttttgtaccttcagatgatttttttttttttttttgagacggagtcttgctctgtcacccaggctggagtgcagtggtgcgatctcagctcactgcaagctccacctcccgggttcatgccattttcctgcctcagcctcccgagtagctgggactacaggcacccaccaccacatccggctaatttttttgtatttttagtagagacggggtttcaccgtgttagccaggatggtctcgatctcctgacctcgtgatccacatgtctctgccttccaaagtgctgggattacacacgtgagccaccgcgtctggcccagatgattttttatcactcattaacatgcttttctttctgactgaagtactccctttagcatttcttgtaggacagatccggtgttgatgaaattcctcagctttgtttgttctgggagagtctttatttctccttcatgcttgaagaatattttcactggatatgctattctagtgtagcaggacaagctgtggagaaaaccccacagacaccgagatagtgaaggaagtagcttttaatcagctggaagcatcagcagactagcatcttaaaattcaagcttgttgagtgcacaatttctgtcgcttttaagggttcacaacactaaagattttacatgaaaggaccgtgattgattgagcaatctagggggtatgtgacaggggctgcatgcaccagtaatcagagcaaagcagaacagaacgagaagtttcacaatgtctttccatacaatgtctggaatttatggataatcggttgctaggtcatgggttgaattttaactatcaggctaaggtcaggcaggcccaggcctggttttgggtctggttttgggtctggtgcatggcgccgggctgcctgcctttggtttcgcttccttgtttcttcttaaaacaggtactgagtatgaaacaatatagaacaatatgggggggtctctttctctcttctctcatttccccgctttgagactctcactcatggtattagtggaagttctcactttcatttttactacttatgtcttcctgtgcaatagattgatagtgattcaaataatatactcgtgctgaagcattctggtgaactaaggtagtgatgaagctttttatcatttgaagaagtataggtagcaaacaagggagtagtaagcggattcctattactattataactcctattataagagttttaagccctcctattgctgggaaccaatttccaaacatggcctcaggatcaaatccgtgccacactcgcactgtacatgtgccagttttgttatatctttaactatgtcttcaactacttgcccttgatcatctatgtggagacagcaattagtaaggttaaattttccacaaactcctccttcagctgctagcaagtagtcgagagctagtctattttggtagatagcattcctcatctgagtctcttgccgggcaagaacagtcaaggcttgaccagtttaattagtaataatttctaaaacagcttgcaactgtatgattcagttgagcatgtagatgggggtccaatatccctatgagccatcttatgcccaagtggcgggcccatagtattgtataattctttcagggggccatcatcatctttccagttacctatggctatgcttcgtttttcacgggaagcatagacagggaatcctaagagtttgttgtttttatgggcagcaggaagaaagatggtttaatagtgccaattacacagctacctgtctactgatcagatagcttagcataagctctatgtccacatatccagtataacccagtaggggcagtccagtcccagtggaattctgggtgggcctaaacagtctgcaattttggaaatttacggaatggatttttttccgtgtaattggaactccaccatgtaactgtttttgtggtaccattatacagtttttgtccaagacaactaacctgtcctacaggatgagtgaattcttttccttctctagctatgcaacattgtccaataattgaggcttttagaacccagaaattgtcagggtggttcttttgggccgagaattcatcaggaactgggtctgtaggaactcattctcgggcttcccatggccactgatctcctgttacagttgctccacaaacaaaacacgaagtgacttttagagactgggctacatgctcggctaactgcaaaaacaaatgtctagtttttcctggaatttcaggcactggcacattttgttcatcatagaaagtgtgaaatactggctctggagagcatgttcgaacctctccttttattaaaatgtttaccctagggtctagtctttttccatcaatgcctagagataagtattttccttttttctattttgggtctgaggggcttgtgattactaattttaaagggttgcagcttccactcatgcaggacaggcttcctttccctttttggagcaaaacaggatctttttcattttttttttcccaagtagcctaaatgacacaagaccagtacccacattcttttccacacaatcctgattcatgacagatgtacttattttcggtcatgtagttttttcctaattaaaagagccacatcctgctcctaacttattgctattaatgacagcacagcgtcaaatcttaagattatgcatttgggcacccctttttcttctgttctggctaatactttacttgtatcatttatgagtccctgccagtgttcagtccttaatcttatttcaaaaactgtggaaatgggaggttcagaggggtcatagcacacatcgggctggtcacttcctggatcacagactttgtactgagtgttattatacaaacatgttccttttggaattcctaggccttcataataactatagaacaaaaagattgtcttaacttgttgtcctacctcagtgacctgaggtatgcactgaaagcagtcctctgtgtgggaagaagcagtggaagcttttaccacacaagtccgtgttataaggaaagtaagtcccacgacgattttcctcatgcttcggccgcgaataggccagtcagcttccgggtgtgactggagcagggcttgtcgtcctcctcagggttactttgcagggattgtctaggcctggtttggcctcccaggttccagtggctgcaggctttccgcagctgtggtgaatcccggccggaattccttctaccttcacagccgtgggagtggtcaggataacggtctggggtcccttccactatggccctaagggagctacgttccagtccttgatccacacgcggtcacctggagaaaaagggtgaactggggagaataagctgaccgggcacctcatttacccaagttgagattgtctcggtaattttccccaaggcctgtagctgtcgctgcaattcaatttcacccaactcttggggagtacccagaagccctcgcggcataggaggaggcctatgatataatatttcataaggggagtgtcctgttttcttagagggggtgcacctgttttaaacaataccataggaagggcctgtatccattttaatcttgtctcttgacatactttccttaaactatttttgatagtccgactcattcgctccaccttcccagaactctgaggtcggcaggcagcatgtagacttgtttgtacctgtccttcttgggaaggctttccaggtattcaaaaggacttgaggattgtgatctaagccatatctgtatcagggggcctcccaagcctattaatgctgtggtttttgtttgttttgtttttttgagacagagtctcactctgtcacccaggctggagtgcagtgtcatgatctcagctcacggcaacctctgcctctcaggttcaagcgattctcatgcctcagcctcccaagcagctgggattacagctgtgtgccaccacgcctggctaatctttgtgattttagcagagactaggtttcatcatgttggccaggctggtctcaaactctgggcctcaagtgatccattcacctcagcctcccagagtgttgggattacaggcgtgagccaccacacccggtctgctacggttcttgcagactcatagaggtactgccttagtggtcttggataacatccagaagaattatctggattaccaggcagaggctcttgttctcttcttttactttctcccaaacaaagggagctgagccacctggaggtggggatagggtgacacaagcaccactgtggccagtagcactgggactgcactgggtctcgaccaaagcccactataaccgctacctggctgctggctatatttgcttaaggccctagggctctaaaaccagcaggttccaaatgcagccaggcttatatccttttcgtcagggcagcaagtttcccaaagctctgggtgggtccagaaatgcagtcagtaagccagggactggagtcaaaaaccttagaaatctacctggtgtcttgttctactgtggctgaactggctctcaaatcacaagacgctcagccgggtgtggtggcgcatccctgtaatcccagcactttgggagactgaggcgagtggatcacctgaggtcaagggtttgagaccagcctgtccaacatggtgaaactccgtctctactaaaaatacaatattagctgggcatggtggtgcatgcctgtaatcccagctactcaggagaactgcttgaacttgggaggcagaagttgtggtgagccaagatcgcaccattgcactacagcctgggcaagaagagcgaaactctgtctcaaaaaaaaaaaaaaaaaatcacaagacactgtctttcccactcttccctccctttgccacaggcagaggtgcctcaccccatggttaccacaaccataggctcaaggggagtactgccaggcttctgccaaagttcactcaaggcccgaggagtcttcagtcagcttctagtgaatgctgccaggcctaggactcacccctcagggcagtgggctcccctctggcccagggaatttccagaaatgccatcctagagccaagatctggcatcagggattccaagatcccacttctcctccactgtgtctgagctggtacctgagctgaaagacaaagttccttttacttttccctctgcgtttctcaagcagaaagagtccctcactgtagccaccatagctgggaatgtggtgggtctcacctgaagacagcatgtctcagagtctcaccgaaggccaatagcatgtagtacctggcatcactgcttgttattcagggcccaacggctcttgagtcagcaggtgatagagcctgccaggactggatccttcccttcagggtagctggttcccttctcgcccaaggtgtgtctagaaatgtcatctggaagctaagtcctggaatgggaggctcatgactctgactcgtgtcccatcctactgtgtctgagctggtatccaagatgcaagacaaagtcccctttactttcctctcctctccttaaacagaagaaaaggggtcctttttggagccacaaggtatgctacctggatttgggaaaggagtggcacaagtggccccttagctgctgaggttggtgtcttagtaggtcatgtgccccccaaatccaatggctttgagtccagctcagcaccaggacttgcctaggagttgcagtcctcatgacctagactgcctttcaactttatttaggaccccagagcactttagccaacagtggtgtggcttgccaaacctcacattccgactgttgggatgggcgattctcctctggcttgggctggtctaaaatgctcactccaggagcagacagtctgctgagttcagggcagttttgctttccactgtgacagggcagcactgagttcaatgcaaagtctcaaaatcactgcactctctctctcccaaacacacagcttctctctgtgccatgcagctactgccagggatggaggatggcgggaattggcaactaaagactgtcctcctaccctcttcagtgtgtccttcagcaatatgaagttaaaaccaggtattgtaaatgcttacctgatttttagttcgtatgaaggtgcttttttcctgtagattgttgttaaatgcggtattcctgaagatgaaatgattggtggaaacttatatttggccatcttgctccagcccctctctagacattctcttactgttttatttggaaaatactgaaacagacatacacacacacaaataaaaatcacccatagccccatcatctctaaaatgtataaaaataatttgcactgtctctctgttcgccagtccctcttctcccagattaagcttctcaatttttaacaagcataagaaatctagttaaaatgcagattcctgggcaccaccctcagctattctagtttgggaggcctaggatgagacccaagaatctgcatttttaaacaaattcactgatcggctgggcgcagtggctcacacctgtaatcccagcactttgggaggccaaggcaggcggatcatgagatcaggagttcaagaccagcctggccaacttagtgaaaccccatctctactaaaaatacaaaaaattacccaggtgtggtagcgggcacctgtaatcccagctactcaggaggatgaggcaggagaattgcgtgaacccgggaggaggaagttgcagtgagccgagatctcgcgactgcactccagtccgggcgacagtgtgagactctgtctcaaaataaataaataaataaataaataaataaataaataaataaatacaataaaatacaataaaaaattttcactgatcatggagccacaaagatgtctgagaaaccctattcaagctctttggctttctaggatagatttgcatgtcaatatcagcatgcacatttttttttgttttttgtttttggtatttgcttgtttgttttagtaaataaaagctgctgtaattattgatctgcaagtgattgtttttaacttaaccatattccctggacttcagaaaaaaattgacataacttatctacagtaaaacacatgagtctgaggccaggcgtggtggctcaggcctgtaatcccagcactttcggaggctgaggcgggcagatcgcttgaggtcaggagttcaagaccagcctgtccaacatggtgaaaccccatctctacaaaaatacaaaaattagctgggcgtgatggtgtgcgcctgtaatcccagctgcttgggaggctgacgcaggagaaatgcttgcagaggcagaggttgcagtgagcagagatcatgccactgcactccagcctgagcaacagagcgagactccgtctcaaaaaaaacaaaacaaacgccaggcgtggtggctcatgcctgtaatcccagcactttgagaggctgaggcgggcagatcacctgaggtcgagagttcgagaccagcctgaccaacatggagaaaccccatctatactaaaaatacaaaattagccgggcatggtgacacatgcctgtagtcccagctactcgggaggctgaggcaggagaatcacttgaacctaggaggcagaggttgaagtgagccgagatcgcaccattgcactccggcctgggcaacaagagtgaaactccgtctcaaaaaaaaaaaaaagtaaaacttagccaggcatggtgccatgtacctgtggtcccagctgctctgtaggctgaggtgggaggattgcttgagcccagcagcttgcagatgcagttagcagtgattgtgctactgcactccagcctgggtgatggagcagaaaataaactaataatctggttcccaaatgtcaatagtgtcaaggttgagaaaccttgctgtattcattcctcagcccatctcattttcttgatttcaaaataagttgcagacaacagtattcttcagtgcatatacttcacatacccattcttttaaacaggttttaaacagctacttagtgtttcagaatacaaatgtaacgctacttccagaactgattctctacatagattgctccccgtccttttttttttttttttttttttgagatggagttttgctcttgttgcccaggctggagtgcaatggcatgatcttggctcactgcaacctctgcctcccaggttcaagcaattctcctgcctcagtctcccgagtagctgggattacgggtgtctgccacaacacccagctaatttttgtatttttagtagagatggggtttcatcatgttgtccaggctggcctcgaactcctgacctcgtgacctgcccacctcggcctcccaaggccgtatatatatatgggagtttattaagtattaactcacacaatcacaagggtcccacaataggccgtctgcacattgcggagcaaggagagccagtccgagttccagaactgaagaacttggagtccgatgttcgagggcaggaagcatccagcacgggagaaagacggaggctgggaggctaggccagtctctcttttcacatttttctgcctgcttatattctagccacaatggcagctgattagattgtgcccgtccagattaagggtgggtctgccttttccagcccactgactcaaatgtttttttgtttgtttgtttgttttattttattttattttactttaagttctgggatacatgtgcagaacatgcaggtttattacatgggtaaacgtgtgccatggtggtttgctgcacctatcaacccgtcatctaggttttaacccccacatgcattaggtatttgtcctaatgctcccctccccctttgtcccccagccctcaacaggccccagtgtgcgatgttcccctcctcaaatgttaatctcttttggcaacaccctcatgacacccaggatcaatactttgtatccttcaatccaatcaagttgacagtatgaaccatcacagtccttatagatattttctgtgcatctgttccatatcatctgtattagtccattttgcattgcaataaaggaatacctgaggctgggtaatttataaagaaaaggccaggtgggtgcctcatgcctgtaaccccagcatttcaggaggctgaggcaggaggactgcttgagcccaggagttggagaccagcctgggcaacaaagggagactctgtctctaggaaaaaaaaacaattaaattatctgggcgtagtggtgcatgcctgtggtcccagttacctgggaggctgaggcaggaggatcgcttgagcctgggaggtggaggctgtagtgagccatgattgtgccactgcactccagcctgggcaacaaagtcaatcactcaatcacacattcactgtcctacaattatggaaatcagaagcccgaaatgatttcagtgctgaaactgccatgtttgcagtgctgtgtcccctctggaggctctagagcagaatccacgtccttgccttccccagcttctagaggagctctgcaggagccccttctcccttcttcaaagccagcatcctggcatcttgcttccgtcttcacatgaacttctgaatcaatctccctctgcctccctcttataaggacccttgtgatgacatttagggtccacctggatgacccaggataatctctgttctcaaactccttcatttgattacatctgctaaatccctttcctcatataaggtagtattcacaaccccagggattgaggtgtgaatatattttgggggccactcttcagcccacagtgttggtaatttgcttcctatcttaatgcctatttccccattcgagtttaattcctatgagggcaaagatcttcatctgtttaattctccactgtgtccccagcacctaggacagagcctggcacatagtgaataataaataatgaccaaggcaacatggcaaaaccccgtctccaccgggcgtggtggctcacacctgtaatcccagcactttgggaggccaaggcgggcggaccacctgaggtctggagttcaagactggcctgaccaacatagagaaaccccgtccctactaaaaatacaaaaattagccgggcgtggtggcacatgcctgtaatcccagctactcgggaggttgaggcaggagaatcgctggaacccaggaggcagaggttgcagtgagccaagatggtgccactgcactccagcctgggcaacaagagcaaaactccctctcaaaaaaaaaaaatctccacaaaatatttaaaaattagtcaagcatggtggcccacgcctgtggtcccggctacacgtgaggctgaggcaggaggatcgctttctccggggagttcgaggctacagtgagccattaccgcgccactgcactccagcttgggcgacagagtgagtccctgtctcaataataataacaataataaaataataataataataatagtaaagatccactttgtgcactccttgctctggggaatttttctgaaacagtggacagtgtctctatgataactctcaccaccaccaccaccacccccgctttgttttctcagtcagagcactcgatctgggccctttcaactcgcccctcatgctttccgtctgcagcaccccatccaacttcacccaaagcgcccttaagtagtttctgagaggccgtgcctgcaaattcccaattggccacaaggtggaggtgtgggcctgttttcccagccgccacccgtttctagagctggacccctggaacaccaggctctttctagcttccctgcttccgccctagcggttcccaccggcctggaatgccgacttgctcgctctctgcatcccacgggaaaaggagcagaacagaggcttcctccctgactctcctgcccgagcttactgggacctgaatctccccgtgtttagtagtttagcggtttgtgatcaggtcggcctccaccatcagagcagcacactctcgagatggggctcaggcctgactcttttcggggtccccagaatcgctcaacacaattcttccagaagcctcgggatgcgattaaaggattgccagatttttcgaccggtcgttttgtcgaatcatttagttctgggtagcaagaggctgaggaggggagagtgacgtcacctccgcgggtggggcagcaccgctccccgaacccgggggcctcgagctccccaggggtctaggaatccggagggagagaggagaaacaggagatgagatccgggggaatggtatccttgcccccttgaacaggaactggtaaacccttaccaattacggccaacccccactgccacctgtcgctgccgtcgcaacctgtcgcctcccacccatgttgtggctgcgcccgcccccgtcagggcgtgaccacggcgtggattacaacgaccgtgatgctccacggcgccgggagcttttgacggaaggtagcgtaggcgaggggcttcatgggactcgtattacaaaacccctcaccagggtgcgtcctggagaaaaggggtgatacccttcgcctccctcttcctcaactccatgggtacaggcacaaagttttctattattatttttgagatggagtttcgttgttgcccaggctggagtgcaatggtgcggtcttggctcactgcaacctcggcctcccaagttcaagccattcgcctgcctcagcctcccgagtagctgggattacaggcatgcgccaccactcccggataattttttttgtatttttagtagagacggggtttcaccatgttggccaggttggtctcgaactcctgacctcaggtgatccacccgcctcgacctcccaaagttctgggattacgggcgtgagacaccgcgcccggtcacaaagctttctcgttaaaaagtacgctctgaaaagaagcaacccaggcaggttcgctcaatggaaatagtggatttttactgggtagcaggacctccgcgaccacccgctgcgcatgcgcttcacttgggcgtcacccggggaactgcgcctgcgcagtctctccccatccgaggtccgctccgcgagtgcgagcgcgcgccaggcccacccgggcgctgctcttcatgtccccgcggtcgaagacggccacatacgtccccaagaagacgtcaccgaggatccagaagggccctgcaggcggagggacatccagggcctggaaaccggacaagcagaggcggacgccatttcgagtagtctgcaaggcaacaagacgacaactgggtgtcgcggccacaaggacggccatttgcctgggagcccgtccatcccccccaccctcgggttctttgatgttcgccaacaaactgccatcacagggaaaagaaatgtttctgtggccccttcccttcctagtgacgtctctcagctctaccctctcaaaccgtcatatgacgtcactatggcgtcatggtgatggccacctacctggatgacgtaatcatgggccgtgaggttaaaccagacccccccaagaaggaaggagactgcggggagctttgggatttccgagcacaggatgatgtactgggggagaagaggaactagtgaagatgagagattcctgctctgttcagtcccttccgtggctccccagtgccatagggtaatttccctattgagcacctgggtactcagcgtcctgtgtgcagaggccctgccgcctagacttacgcagtcccaagcaaacctgcatgatcgtctccctccacccggccaccatccgcagagtcgcagtgtagacacgtggaaagtgtcctcaattcctccaccaccctccagactatctgtcacgaagtccagtgcctgctgccctggaaagccccttaaatacttgcctcccaccctcaggccctttgatgttcactgtcaaactgccatcagccttcccagcccgtacccaccagactgggacctcacctccccagccagcaaggggattcccccaatggctgcatgcagggcccggatctcctcagtgggtcctgtgatgagggacgtgcccgtatccaggatggcagcacagcccttggcacagagagtcagccctgggcccaccttcacactgagggggaaggaggcagtcatcagaggcagggtcctaggagtccaggcccccagcctccagctccagagccaggagaccaagtccctcaccgctccatgtggatctgccagtaggcagggaccgtgactggcacgaaggtgaggggtgggatgtagtgtgccgggtccgagccccccaggaccagctctcctccatcaggctcttcagggtccctgcaggggcagagtgtagagagtgtagatgtcagtgtcactggccctccctcagccctaggtattgccaggaatggcacttcccaccaactgggttgtttctggagttcctacggggtaatgggatgcaggaagggcctagatgttgggactggaagccgggcaagaaaagcatgatgcttttcttggtggaagctagaacttcctgaagtgaagacgagacttcatttggctgtggaaggtagagttttggggaatttcctgagctgaatatcatagtaaccaagtagagcagtggtgtcttggaattggctcttgaaggtgtgacttgtgcaggggtggggtggcttcctgagtaggagaagagaatttctgaattgcctgttgtgatatctagagaggtgttagacttcctgagttggctgagagcgatgggaacagggatggagacttcctggaaggtggaggagagcaggatctgctaggtggttggtagaactgctagagtgggttggatgtcagggtaactgagtgggcataggattttctgactgtgtgtgacaggcctctgggagggaaagtggagacttcttggaaacttcttggatgttgggtgggacttctgagcataatactgaacttcctagcaggtgagtgggacttcctggattaaatcgggcaattcctgacttctggtcagtgttctcaaatgggatttgagcattctttgtgaggaagagaaagctcctgagtattttgttgggtggggcatggaatttcctagtttgattttgaaacatggagcattctgaactgatggtgggtttccttagtatgtcttaagttgtcatttaagctctgggacttcgaatagggttgaggtgtttctttatagggcaggtgacttcctgcatggaggatgcaacttcttgtattgaatggctgacttcctgaatggacagtgtaagtgggtgactctgagaatgagaattcctgcattgggtcagtgacttcctgaaggaagactctcttccttcttggggataggactcatagataggtgcacacttcccagtacctgttgaggtaaaaggagaagacaggcttatccaatagcccctgctccaccagtacatccatcgggggccgaactccttccacagacagaatgggaaaaccgaggcccaatatcccatcaaaatgggcaaaagcgaagaccaggctgggctcccagagagcctccccgaaaatcactgatgcacccttgattccaccaatctaggggtagattgagatgtgaccagttacttttgggaggacaataaccacatgtcctgaggtctcccaaaccaaggcatgaatcctaggtctggggacttctggatgcaagccccaacttcctaggaaactatgcctcttgagaagccccaccccttcacccaggaacccctttcttctccttgagaagccccacctcttcacccaggaagctcctcccctgcttgagaagccccacctcttcacccaggaagctcctcctccctgcttgagaagccccacctcttaaccttggaagctcctcccccctgcttgagaagccccacctcttcacccaggaagcccctccccctccttgtgacgcaccatcccttcactctgaaaggcaggccctcctccccacttgaaaagccccatccattggcttgggaagctcctcctcgagcctcttcctaagccagatgatcttagacaatggggttctcccaggctcaagacttctgagagtcaaaggccactcacagtcagcttgtcctcgctcaggattccatctacccgcccagttccatattgaatggcaaacttggtcccattggcctggaaggagctagaggctttgggatcaaatcggtggtgtaaccctaggttagaggtcagaaaggtgtcatgggggagggaatctccccagtgcctactgcccctttgactttctgacctgtgagggcatgataaaagaacagttcctcaaaagcctctgagaagctgaggtccagccccgcctcctcccttcacccccattcagccttattctcccacatagaagctcacagcagggcacactgaagaagtggcatctcctggacgggacccagagattggaggagccagtgtcaaaggcaacagtgaagttttgtggaggcgttcccagcccaatttccccaaaatactgcacctgatagcaaaagaggagagtaaacgaagagtttggctcaagggcgcaggggtgagggctgtgtggggctgtgactcacatccctgtagttcgagagaggtacgaagatgggcttgtccccaggggatggggcccccaacttggggagctctgctggttctctccatcccctcagtaggttcaggatcctgcgtccaggttggactcgatgaagagggatgctgtagggaaagaggatattgacaggaagctgcccttcttggagaacctctaaatagacttacccaaataggatatgatgacaaattcaacatctccaaggcactacaatagtagtcagtaccagaaaccctgcaataacaacctccagaaaagcccatcaaagatgccatgatgacaaatatccccaaagactttacaagagcaaaccatcccaaacagacctttccatgtccaaatcccttaaaataagctattcccaaggaattgacattcttaaagatttcccaagaccctaacagaaaacctaacctttgcaaaagcccttgggtggtggcccctgcatgcttcagttcgtgaggttagggactattttccccacccttgaggagaaaaatgtaagcgtcaaatcttaattgtcttgctgtgttgcccgtgctgatctcaaactcctggcctcagcctcctaaagtgctgggattacagaggagagccactatgccctgtccgggttcctttaaactgtatttgcaaaagcaggaggcaaacaggatttggcccttaagctgagtgtttgcaacccttgacttagagggccaattacaattcaggtatcttagttgctaattaagtaggtctaggatggagccgagaatttggatttctaacaagttcccaggtcatgacgatgctgttgatacaacatttggagactcattttctttgcattgacttagaaaatggccatgagacattaggttcaaaaagcaggttaacaagcaccatgtgcggtaatatcttcgttcctgcctttagtcactccttgaagcacttgtcacatcactcacacctttcccgtcaccccccatgagtcagtctttgagaggcacgagaatgtgaagtggggaaaactcttcctggaagtgtacacccctccccctaccaagagttccagggaatgaagacaagagaggagaaaaagagagatgggggcggggaggggacatcagaggtaaggtagtgggaagacttcttgcatagggtccccaagattggatttctttttcttcttttaaactttttatttgaaacagggtctccctctgtcacccaggctggagtgcagtagtgcagtcagggctcactgcagccttgatctccagggctcaagtgattctcccacctcagcctctggagtagctgagactatgggcacaccaccacacctggctttttattttattttattttatttattaattttttttttagacaaggtgtcaccctgttgcccagcctggagtgcagtagcaggatcatagcccactgccccctcgaactactgggctcaagcaatcctccttcctcaccctcctgaactagctgggaccatgggtgtgcaccaccacactgagctaatttttgtattttttgtagaggtggagtctggccatgttgcccaggctggtctcaaaactcttggcctcaaacaagcttcccaccttggacttccaaagtgctgggttacaggtgtgagccatgtctctggccaaaaacatgacttcttcaggccagtttgatgggcgtgatgtgggggagtctcagtttaaatgtcacatatctggggctcgaagatgggaggagtgtgtcacaggtctggaaaccacagtacctaatcatcagagctcatagtagggtctgcagagacctctcaaaaacatgtcctggccaggcgcagtggctcacgcctgtaatcccagcactttgggaggctgaggcaggcagatcacgaagtcaggagttcaagaccagcttggccaacatggtgaaacctcatctctactaaagatacaaaaaaaattagccgggcatggtgactcacgcctgtaatcccagcactttcagaggcaggagaatggtgtcagcctgggaggtggaggttgcagtgagctgagatcgcgccattgcactccagcctgggcgacagggcaagactccgtctcaaaaaaaaaaaaaaaaaaaggccaggcgcggtggcttacgcctgtaatcccagcactttgcgaggctgaggtgggtggatcacgaggtcaggagatcgagaccatcctggctaacactgtgaaaccccatctctactaaaaatacaaaaaattagccgggcgtggtggcgggtgcctgtagtcccagctgcttgggaggctgaggcaggagaatgatgtgaacccgggggacagagcttgcagtgagccaagattgcgccactgcactccagcctgggcaacagagtgagactcagtctcaaaaaaaaaaaaaaaaaaaaagtcctgagaggagggggaggggtcctcaatctagagtctcagtgttgtaagatctgggacttaaaagggctctgggaccggacgcgggggctcacagctgtaaccacagcacttttggaggctgaggcggaaagatcacttgaggtcaggagttcaagacagcctggcaaacatggcgaaaccccatctctactaaaaatacaaaaattagccgggcgtggtggcatgtgcctgtagtcccagctacttgggaggctgaggcaggagaatcacttgaacccgggaggcagaggttgcagtgagctgagatcgccccactgcactccagcctgggtaacagagcaagactctgtctcaaataataataataataataaataataataataataataataataataaaagggctctggtcagccaggcgcggtggctcacgcctgtaatcccagcactttgggaggccgaggtgagcggatcacgaggtcaggggttccagaccagcctggccaacatggtgaaaccccgtctctactaaaaatacaaaaattagctgagcatggtggcgcgagcctgtaatcccagctacttgggaagctgaggcaggagaatcgcttgaacccaggaggcagaggtttcagtgagctgagatcatgccattgcactccagcctgggcaacagagtgagactccatctcaaaaaaaagaaatctggtcttaagagatgtcagagtggagcccttaggggtgacagcctggtttagagatctggaaagctgagaaagaagctctagggatcctgggtgccaagtttggggatcactgaactgggagtcctagacttaaagggcaagaggcagaaaatccctcctaaggttggggtggtagatggggtcaccataccggatcagtgtggccccggaaggctccacattcagcagaggcagcagcagcagcaggggttgcagcagcggtggtggagacatcgctggggacctgggtgtgaacccaggtgtcctggggcctcattttctttcccctgtgactccaccctgttcatgccccacctccaggtttagaaggagaccaggacatgaaatctgtccgcaggtgacgcagtgggacaaggatgttttttgaagatttgtgcagagtatttttgtagggttggcagaagtagcatcctgtgctcctggtgctcctcactccctacttgggtggcagtggtggtggggtctcctccaccgtcaccacctcccacccccccatccttcagctgctgtcagttttacttttaactttcacataacttttctgagacttattaaccacaagtgtttccttggccaagtgggagagaccagcaggtatctgtgaagggcctgggggaagggagaaaggacatgattagacacctgccctcacatatgaagtgggcccgcatttcaggacccagtctcttactgttttatttgtaggtgaagtatgtttcttgttgacaacagatcattgggtattgttttttgtttgtttgtttttgtttttgttttttggtttttttttttttgagaccgagtttcactcttgttgcccaggctgggattacaggcatgcgcaaccacgccccactaattttgtagttttagtagagacagggtttctccatgttggtcaggctggtctagaactcccgacctcaggtgatccgcccgcctcagcctcctaaagtgctgggattacaggcgtgagccactgcacccagctgattctcaattatttcaatctctttgttaaatttatgtgatggaatctgaattccttctgtgtgttagcttgaatttctttgagtttcctcaaaacagctattttaaattctctgtcggaaaggtcacatatctctgtttcttcaaggattggtccttggtggcttatttgatttgtttggtaaggtcatttattctggatggccttgatgcttatagatgttcattggtggctgggcattgatgagttatttatttatttatttatttatttatttatttatttatttagatggagttttgctcttgttgcccaagctgcagtgcaatggtgtgatctcagctcactgcaacctctgcctcccaggtgcaagtaattctgcctcagcctcccgagtagctgggactacaggcacccgataccaccctggctaaattttttttttttttttgagatggagtttcactcttattgcctaggctggagtgtaatggcgccatcttggctcactgcaacctctgcctcctgagttcaagcgattgtcctgtctcagcctcccaagtagctgggattataggcgcatgccagctagtttttgtatttttagtaaagacagggtttcatcatattggtcaggctggtctcgaactcctgacctcaggtgatccacctgcctcggcctcccaaagtgctgggattacaggcatgagccaccgcacccagcctacacccagctaatttttgtatttttagaagagacagggtttcaccatgttgtctagcctggtctcaaactcctgacctcaggtgatcttcctgcttcagcctcccaaaatgctgggattagacatgagccaccatgcctggccatgttaggtatttattgtagtctttgcagacaaggcttgtttgtacctgtcctttttggggaggctttccaggtattcaaaagtacttgggtgttgtgatctaagccatgtctgcattagggggctccccaagcccattaatgctgtggttcttgcaaactcatagaggtactatcttagtggtcttagataagatccagaagatttatctggattaccaggcagagactcttgctctcttcccttgctttctctcaaacagagtcagtctctctctctccctctctctctctctctctctctctctctctctgtctctgtctctctctctctgctgagctacctggagctgggagtggggtgacacaaacaccccatgcctactatcactgggattgcgctgggtcctgcccatggcctcctgtaaccacgacctacctgcctactgcttatgtttgctcaaggcccttgggctctaaaactagcaggttccaaaggcagccatgcttgcatccttcccttcagggcatcaagttacctcaggtcccaggtgggtccagagatacagtcagtgagccagggactggagtcaaaacccttagaaatcggctggatgcggtaactcatgcctgtaatcccagcactttaggaggctgaggcaggcggatcacttgaggtcaggagttcgaggccagtctggccaacatggtgaaaccctgtctctactaaaaatacaaaaattagccaggcgtggtggtcagcgcctgtaatcccagctactcggaaggccgaggcaggagaatcacttgaacctgggaggcggaagttgcagtgagccaagatcgcgctgctacactccagtctgggcgacagagcaagactccctctcaaaaaaaaaaaaaaaaaaaaaagaaacaaaagaaaggctaggtgcggtgggggtgcgtttgggaggctgggggtgtcatcccagccctttggaaggctgaggcaggaggatcgcttgcgcctgggagttggagaccagcctgggcaacaaagggagaccctgtctgtacaaaaaaaatgtaaaaattatctgggcgtaatggcacactcctgtagtcccagctactggggaaggtgaggctggaggataacttgagcctaggaggctgaagctgcagtgagccgtcatcacgccactgcactccatcccaggtgacagagtgagacactgtctcaacagaaataaataaatacataaataatggtaaagatccactttgtgcactccttgctctgggggattttcctgaagcagccgaacgtgtccctgataactgtcaccacccccctttgttttctcagtcagagcactcgatctgggccccttcaactcgccccgcacgctttccgtctgcagcaccccatccaactgcacccaagcgcccttaagtagtttgagaggccgtgcctgcaaattcccaattggccacaaggtggaggtgtgggcctgttttcccagccaagattccccagccgccacccgtttctagagctggacccctggaacaccaggctctctccagctttcctgcttccgccctagcagttcccaccgcctggaatgccgacttgctcgctctctgcaccccacgggaaaaggagcagaacaggcttcctccctgactcccctgcccaagcgtactgggagatctcctgccgaacacggcccggccaatgggacctggatctccccatgtcttgtctctcagggggttgtgaccgagtgggcctccaccatcagaggagcacagtttccagaatcgcccaacacaatctttcccgaatcccctcaggaagtgattaggtaaaggattgccagatttttaaacccgtcattttatttactaaccttgtaagaaaggaattatcgcccacattttaccgggttggggaggggctgctgcggtgcagcaagattaagaggaggcagcccaggtgcacttggaggggaattgaacctggttcttgaagctgcagacaccaagtaatcagcccagatgcctcgcatcgtctttgccaggattacttttgcccctgttccattggtgggaatctgtcacgtggttgctcctggctgcaaggacgacccggaaatgtagtccagttgtgtgtccaagagtgggggaccctttgggtgactctcaggcactgtgggccacatcagaccccacaaggcctcaagttcggacctgcgttccctctatgatcttatatcgcaccttcccgaggtctcgcattagtgttttttttttttttttttttttttttttgaggcagaatctcgctctgttcaggctggagtgcagtggctgtgatctcggctcactgcaacctccgaacccccaggttcaagcgattctcctgccaatttttgtaattttagtagggacggagttttgccatgttggccatgctggtctcgaactcctgacctcaggtgatctgcccgccttggcctcccaaagtgttgggattacaggcatgagccactgcacctggcctactcaaaatattaaacataggccgggcatggtggcttacacgtgtcatcccagcacgttggcaggctgaggtgggaggattgcttgagcccaggagttccagaccagcctggggaacatagtgagtctgtctctacaaaagaattacctgggcttgctagcgcatgcttgtagtcccagctactctggagactgagatggcaggatcacttagcccaggaggtcgtggctgcagtgagctgtgactacgccaccccactccagcctaggtagcagagtgagacactgtctcaaaacaaaacaaaacaaaaagttaaacatagagttactgcatgacccagcaatcccactccaaggtgaaatgaaacatatgtctacacaaaaacttgtacatgaatgttcatagcagcgttgcagccaagaatagaaacatcccacctgtccattaactggcgaatgggtaggtaaaaggtggtatatccataccatggactattactgtgccataaacagaaatgaagtactgatacattctacaaagtagatgaacctagaaaacgttatgcccagtgagagatgccagtcacaaagagctacatattccaacgatccatttataggaaatgtctagaataggaaaattccataaagtcatataattttttctttttttgaaacagagccttgctttgtcacccaggctggagagcagtggtaccattatggctcactgcaacctcaacctcctgggcacaagtgatcctcccatctcagcctcctgagtagctgggacaagaggcattcgctaccctgcatggcttagtttttaattttttgtagagatgggggtgggggtgtctccctatgttgcccagattggtctcaaactcctgggctcaaacaatcctccagcattggcctcccgaagtgctggggttacaggcatgagccacctcactcagccagatatagattaatggctgcctcaagctggaagaaaagggtgggagaattgggtataactgttttttgtttgtttgagatggagtctaggtctgttgccaggctggagggtagtggcgtgatctaggctcactgcaacctctgcctcctgggttcaagcgattctcctgcctcagcctcctgagtagctgggatttcaggtgcctgccaccatactcggctaatttttgtatttttgtagcgacggggtttcgccttgttggctaggatggtctcaatctcttgaccttgtgatctgccctccttggccttccaaagtgctgggattacaggtgtgagccaccgtggccaacgggtatatctgcttatgggaatggggtttctttgtggactgaccaaaatgttctaaaattggttatggtggtggttgcacaacccgtgaacttgctaaaaaccattaaattgtacttgaaagtgctgaattgtttggtgtgtgaaccaaatctcaataaagctattaccaaaaaaattagagaatattgggttacttacaaatgagaaccttggtccacagctaccttcagacaacaaaactgccagtgaccgagtgcttctgtatgccaggcactgcgcttccgggatcctcatacccttcataagaaataagaacaagaggccgggcacggcagcacacgcctgtaattcctgcactttgagaggccgaggtgggtggattgcctgaggtcgggagttcgagaccagcctggccaacatgatgaaaccctgtctctattaaaaatacaaaaaattagccgggcgtggtggcaggtgcctgtagtcccagctagtcaggaggctgaggcaggagaatggcgtgaacccggcaggcagaggttgcagtgagccgagatcacgccactgtactagagtaaactctgtctcaaataaataaataaataaataaataagaacaaagccgggcgtggtggctcatgcctgtaatcccagcactttgggaggctgagatgagtggatcacttgatgtcaggagtttgaaaccagcctgcccaacatggtgaaaccccgtctctactaaaaacacaaaaattagccgggcatggtggtgcgcacccgtgatcccagctactcaggaggctgaggcaggagaataacttgaacccgggaggcagaagttgcagtgaaccaagattgggccactgcactctagcctgggtgacaagagcaaaactcaaagaaaaaaggaagaacgatttatcctatttaccagtaggtcaaccgagactgagtgcaatgtgactcgtcccaaaagtgttgtaattcctcttcagcctatttcaggactcttgcacttttctaacagtggaaacttagaactactttaacagccacaagaatcaatacaggctggatgagaggctcatgcctgtaatcccggcaccttgggaggccaaggtgggcagatcgcctgagtccatgagttcaagaacagcctaggcaacgtggcgaaaccccatctctaacaaaaatgtaaaaacttagctgggtgtggtggctcatgcctgcggtcccacatactctggaggctgaggtgggaggatcacctgagcccaggaggtcagggctgcaataagccaagatggcaccactgcactccagcctgggcgacagagtgagatcttatcttaaaaaaataaataaataaataaataaatataaatacagttccaccatatcaggcacctcatttgaaacccaccctgtttatgcttttacctcatttagtcataagagtaaggcaacaaggtcatactcttgatcccggtgggctaggggaagtccccatatgctggtgtgggacctccaccccagccaatgtccaggctcttgacaccatctcgggaaggaacttgaggacaagtgggaaaatactgaaagtacaaagatgtattgcaaagtgaaaagtacacactcaacaaagaggagtacaggtggactccagagagagtctcctgcagggggggtttggggctgctaccttaatgggtttctctctttttgttttgagacagtcttgctctgtccccaggctggagtgcagtggcacgatcttggctcactgcaacctccgcctcacgggttccagcgattctcctgcctcagtctcctgagtagctgggactacaggtatgtactatggatttctttaatcaaggagtggaatattcatgaagattcctagaaaaaggagatttttgagaactgtggtgccacccacttttacaccaaatatgggtgttcctgtaaccgtcctggtgctggtgggtgtgtgtttatgttaatgagcatataacgaggtcctaggtgagacctaggtcatatgtagggccttgttgggtccaatgtgtcttagccaggttggtccacacctagggttttcaagagtcttatcagcccccacctgctgcaactatttcaacagtttccttttgctagtcatgtgaaactgctgcctggaattttctattctcctgtgactaccctgtgttattcctgtctcgctttttttttttttttttttttttgagatagagtttcagtctgtcggtaggctggagtgcagtggcgcgatctcggctcactgcaacctctgactccttggttcaagagattctcctgcctcagcctcccaagtagttgggattacaggcacgtgccaccacgcccagctaatttttgtatttttagttgagatggggtttcaccatgttggccaggatggtctccatctcctgacatcgtgatctgcctgcctcagccttccaaaatgctgggattactggcatgaaccactgtgcctagcctcctgtctcactctttttaatttttttatttttatttatttgtttatttatttatttattttgagacggagtcttactctgttgccaggctggagtgcagtggcgcgttctcggctcactgcaacctccgcctcctgggttcaagtgattcttctgtctcagcctcccaagtagctgggattacaggcacgtaccaccacgcctggctattttttttgtattttttttagtagagatggggtttcatggtgttggtcaggctggtcttgaactcctgaccttgtgatccacctgccttggcctcccaaagtgctgggattacaggcgtgagccaccgtgccctgcctttatttttttatttttgagatgcagttttgctcctgctgcccagggtggaatgcaatggcaagatcttggctcaccacaacctctgtctcccgggttcaattctcctgcctcagcctcctgagtagctgggattacaggtgcccgccaccatgcccggctaattttatatttttagtagagaccaggtttcagcaagttggtcaggctagtctcgaactcctgatctcaggtgatccacctgccttggcctcccaaagtgctgggattacaggcatgagccaccatgcccggctttctcactcctgtttgcaatttacaggcaaggaaactgaggcacggggaggttaaggaactgggctcagtgttacacaggaaggaagtgacagagacaccaggttctgccatttccaacgctcatgttaatcacttgtttcgcttctaacatccctaggtggaaaattccacaatctcaaacgatgggcctgagtagacataataagttacagaagagcatggatcacatagtcccatttcttttttataaaggcatacacatatgtcagaggcattccaaccacagcgattctgtcttgaataggagcttggtaaaataaggctgagacctactgggctgcgttcccaggaggttaaggcattcttagtcacaggatgagataggataggaggttggcacaagatacgggtcacaaagagcttgctgataaaacagcatatgcagtaaagaagtcagccagatcccagcaaaaccaagatggcgatgagagtgacctctagccgtcctcatggctcattatacactaattataacgcattagcatgctaaaagtcacacccaccagcacgatgacagcttacaaatgccatggcaacgtcaggaagttcccctatatggtctaaacgggggaggaaccctcaattctgagaattgcctacccttttcctggaaaactcatgaataatccacccgttgtttagtatataatcaagaaataactataagtataatcacagtgaacagcccaagccgctgctctacctggagtagccattcttttattcctttatttttattgcattttatttttgagacggagtttcgctcttgttacccagactggagtgcaatggcgcaatctcggctcaccgcaacctcggctcaccgcaacctccgcctcctgggttcaagcgattctcctgcctcagcctctcccgagtagctgggattacaggcgcccgccaccatgcctggctaattttgtatttttagtagagacggagtttctccatgttggtcaggctgatctcaaactcccgacctcaggtgatctgcccacctcggcctcccaaagtgctgggattacaggcgtgagccaccgcgcccggtccgagactgagcttttttaattcttccaatcaccaagttattgaaaccatttttgcaaaattttaacaatgagaaaattctgacatctcaaatctggccaggcacagcggctcacgcctgtaatcccaacactctggaaggccgaggtaggtggattgcctgaggtcaggagttcgataccagcctggcaaacatggtgaaaccccatctctactaaaaatagaaaaattagccggccgtggtggtgggcacctgtaatcccagctacaagggaggctgaggcaggagaatcgcttgaacccaggaggcggaagttgcagttagctgagatcgcggcactgcactccagcctgggcaacagagtgagactccatctcaaaaaaaaaaaagtaaaaataagcccggtgccgcagctcacgcctgtaatcccagcactttgggaggccgaggcaggcggatcatttgaagtcaggagttcgagaccagcctcgccaacatggcgaaaccctgtctctactaaaaatacaaaaaaatgagccgggcgtggtggcacatgcctgtaatcccagttacttgggagggtgaggcaagagaatctcttgaacccaggacgcagaggctggagtgagctgagatcacaccactgcactccagtctggggtgacagagtgagacctctccaaataaataaataaaaataaataaaactaacaagcagcacgactccaaaatcagaaaacttgtaacgaccaaaaaagtgcaaacgtgccttaaatcagtcatgtgcgacaagcagctatagctagggtttggccgcaggctcagagaagcgcatgaatgagctaaagccacaaagcgcggggctggaggtttggctcccaagaagcgaggaaatgggttcggaactcttctgccaagtcccagtagatctacccggtaaacttccggtgagtttccaacttccgtgcggggcagcagcttcggctggtcctaagcggaccggaagttcgtcaagtttcacgctccgcccctcttccggacgtgacgcaagggcggggttgccggaagaagtggcgaagttacttttgagggtatttgagtagcggcggtgtgtcaggggctaaagaggaggacgaagaaaagcagagcaagggaacccaggtaggtgcacccgagagtggggagacgcaggaggagccccgaacccggggcttctcggcgctccccgcgtactccgctctgcccccttctctccttccatttcctcccctcggtaattcgcgcctcccgcggctgtttccagggcaacaggagtagttcactccgcgagaggccgtccacgagacccccgcgcgcagccatgagccccgccccccgctgttgcttggagaggggcgggacctggagagaggtgcgagggcggagcatgaatggaggaggcggggcggggcatgatgggaggtgatggggcgggacctgcagcgcggtgcgggggcggggcatgaagggaggaggcggggctgggggcggggcatgatgggaggagatgtggcggggcctggagcgaggttgtgggggtgcagtaggaagggaggaggcggggcgggggcggggcatgatgggaggggatggggacctggagcgaggttgtgggggtgaggcttggagggagggatgcatatggggcggggcaaggtgttgggaggcccatgatgggggctttaggggctgaacctggaaggttgagggcggagcatagtaggaggaggtggggtcagaatgagaaatagggatgcttggggcagaagtgaggtagagtcttaagaagaggaggtggggggaaactacatggcatggaggccgtgaaggcagagcatgattaaaggagaatgggccctacctagaaaaagcaggtggattggacctgagggggcggggcctacagcaggggcggggcttaagaccaagctgaaggctggcgtggaacagaagggggcaggtcttgttagaaggatggggagggtttgtaggctggcaggaaccagggttgtggctgagagtagggtctttggagagatggaaaaaaaagggaaagccctgtcaggacctgtaactgacctaacctaacccttcttagccccacaaggctctcaatcccctgtattctacaggctgctccgtgaccccaccatgtcctctcctaccacgagttccctggatacccccctgcctggtgagtgactctcttccccacccagcccttatcacacacgagcagaagctcactgtacctctcccggattccaccctcttccaggaaatggcccccctcagcctggcgccccttcttcttcacccactgtaaaggaggagggtccggagccgtggcccgggggtccggaccctgatgtcccaggcactgatgaggccagctcagcctgcagcacagactggggtgagacagggccctggagttgatgtgggggcttggggaggggtttaggaagggagaaagaaatagaaatgggaatgggaggccctgatctttgctttttgttcttgctttctccttaacatatacatctttctaaattgcaatttccctgaatgtgagcagcaactcctctctccctccatcctctggctctttgcctggggatctcctgtgggcccatctctctggttcctgtttctccttgtggctttctcatggcctctacctacccaccccagtcatcccagatcccgaagaggaaccagagcgcaagcgaaagaagggcccagccccgaagatgctgggccacgagctttgccgtgtctgtggggacaaggcctccggcttccactacaacgtgctcagctgcgaaggctgcaagggcttcttccggcgcagtgtggtccgtggtggggccaggcgctatgcctgccggggtggcggaacctgccagatggacgctttcatgcggcgcaagtgccagcagtgccggctgcgcaagtgcaaggaggcagggatgagggagcagtgtgagtgcagcgggagggggcggtgccggcctggccccccgcctagccctggggttctgctgaggcctgcatccccctacaggcgtcctttctgaagaacagatccggaagaagaagattcggaaacagcagcaggagtcacagtcacagtcgcagtcacctgtggggccgcagggcagcagcagctcagcctctgggcctggggcttcccctggtggatctgaggcaggcagccagggctccggggaaggcgagggtgtccagctaacagcggctcaagaactaatgatccagcagttggtggcggcccaactgcagtgcaacaaacgctccttctccgaccagcccaaagtcacggtactgccccctccacaaccttgagtgtgacggtcccaatggggtagagccagctgggccatcacccagggtgtgggagaatgaggctccagagggcaggggctttgggaagaggatcccccagggtgcaggcttggcctcaaggtggccacccagacttaggctcacaaagacctgggagtgaccctggtctcctgtgtcccagccctggcccctgggcgcagacccccagtcccgagatgcccgccagcaacgctttgcccacttcacggagctggccatcatctcagtccaggagatcgtggacttcgctaagcaagtgcctggtttcctgcagctgggccgggaggaccagatcgccctcctgaaggcatccactatcgaggtaatggtccatctgcccacaaggaaccccagagatagctccaggacagatgctgggagcagagttaaggaagaccagtgcttgccgttgtaggatgacattccacggcgaatagagtcttctatgagccaaggagagaaaggaaaaagggtctgaggctgagaaaattgaggatcaggctagaggcgctattgcagagaaaagttgccaaaaaggcttttcagaggagttagcatttgaatcaaagtagggataacatataagtattgagcacgtgctgtatgccaggctctattccaagtgttggcatatggggcaaagaacaaagcagatcaaaccccgtgccccaaaccttgtgctcacctggggaaagagtatcctaaggagatggggatgcagcatgtgcggaagcctgaagtggagaaagagctcgggctgtctcacgtgatggctgcacgctggtgtggctgagagaacaggggggaaggggacaagggataatcctggtgagattagacccccatttgggccaggaggggagggactagcagctgaagggtcacagggctcaagctccccctcccgctgccgcccttagatcatgctgctagagacagccaggcgctacaaccacgagacagagtgtatcaccttcttgaaggacttcacctacagcaaggacgacttccaccgtgcaggtagggcccaggggaggcttcggggaggcttggcgcccctgctggctggaagacctggggccaactcatccctgttggagtctctgtttctttatctccaaagttggggtgagggttgagccaaggtgagagtgaggtaagagtgcatgtgccacgtgtggtggtgcacgccaatagtcccagccactcgaggctgaggagggcagattgcttgaggctatagtgagccgtgattgtgcgacggcattccagcctggtgacagagaagaccgtgtctctattttttaaaaaaagcatgtattgagtgccgactctgtacattgggttgcagtggaagttgagatgggaggagccctgttaccacatcaggcatcttggtgggcattaggaaaagcattccccgcccccgccaaaacgtggtctcacccaagggaggcgggctggagctcggtccattgtgaagcgggcagccttctttactgtctaggggagcactgcttcctgccctctgagagcgctaacctgcgtgggtgggcttctggaagaaggcctgggcagtgagaggcactgcctaggaaaagggtgggaggagcattgctagtgctgcagagcatgcaccagggcctcgctccctcattgtcccacaatctctgggggacctctctgtatttcccgacatctgtccaaaccccaccctctccccttcctcttactccggccctttcaccacccgagacggtcccagtaacccttttagtatgagcttagcagggcagggctgcagggaagcgtttctggcagaggagattggcgattgcagaggccctgaggttggggagagctggtggtttggaggaactacagggaggcccaggcagctggagcacaaggagatggggtggagaggaggtcgggaatcccaccctaccccttcccagccgctcctctgccaccaccctggaacactgccagggtccccttgaggggccgcctgcctccacccctgcctgatggggctgctcacagcacaggcagaagggtcctgtcagcacttaaggctgcccacttccctcctccgctcagaaccctccgcggctcccgtctcactgggagaagagctagagtcctctctgtggcccacaaagccctttaggacctggcctcgctcactctctgccctcagctctcaccctctccccctgttccagccactctggcctcttactggcacccatccagcatgctgcagccaagggcctgtgtacttggagtttcctctgcccagaactagggggaccaactggtcctagtttgcccaggaccttcccagttttaacactgaaagtctcatggcctgggtagcccccgtcccaagtcatgggaacagcagacgttggtcaccctcacaatccctcatctccttcggattggtcactgctccagcgtcacccagagcgcagccttccctgcccgccttgtgtaaaatagaaccatggctcagcagggcccttcacacttctctgcactgcctggttccattgaactcacagccctctgacaggctgggcctcttcctaatgtgtttgtctatgaccggtcccctaggctctcaaatgtaagtgctggagcctggcacgtggcaggtactcagtgacatttgatgactgaatgaacaagtcagttttgggaatgagtttgggctttaccttgagcagtggaagccagcgctgggaccagcacgatgtgacctaggttttaaaagcttccctttgcctttgtgaaggggacaagaatagggactcgggaagctgcagccaccgcccaggtgggaagggagggtggtgataggatagtagaaaatactgaagaaacatgcaccctcattcattccttcactgggcagcatgtgtggcacacctactacatgccagcactcatgggcacggggcacaggtggacagaaatgacaagaacgctgtaattactgctgtgttcccagccccagagactgtgggcagcgccagggtccaggatgtggggcacggtttcgggctgagggagtcacgggctgcctcccgccccgcaggcctgcaggtggagttcatcaaccccatcttcgagttctcgcgggccatgcggcggctgggcctggacgacgctgagtacgccctgctcatcgccatcaacatcttctcggccgaccggcccaacgtgcaggagccgggccgcgtggaggcgttgcagcagccctacgtggaggcgctgctgtcctacacgcgcatcaagaggccgcaggtagggccccgcagagcctctgcgcagagccaactacgtcccgcggcccacgtggtccgttcaggctgggttctgccagccacactgccctcccctccgcagagtctttcctcaggccccaccctgctcgactgggagccaggtctagtccaagcacagaggcgggccccacgctggctcccacgcctggtcggggaggggccctcctttctgttggggtgggcctcccaaagcctggcagggcaggggctcagccagcgcccacctgcctcctccctcaggaccagctgcgcttcccgcgcatgctcatgaagctggtgagcctgcgcacgctgagctctgtgcactcggagcaggtcttcgccttgcggctccaggacaagaagctgccgcctctgctgtcggagatctgggacgtccacgagtgaggggctggccacccagccccacagccttgcctgaccaccctccagcagatagacgccggcaccccttcctcttcctagggtggaaggggccctgggccgagcctgtagacctatcggctctcatcccttgggataagccccagtccaggtccaggaggctccctccctgcccagcgagtcttccagaaggggtgaaagggttgcaggtcccgaccactgacccttcccggctgccctccctccccagcttacacctcaagcccagcacgcagtgcaccttgaacagagggaggggaggacccatggctctcccccctagcccgggagaccagggccttcctcttcctctgcttttatttaataaaaactaaaaacagaaacaggaaaataaaatatgaatacaatccagcccggagctggagtgcaagatggagagggcgcgggcttctagggacctcagtgacactgggtgcccgaacctgattgagcaggtgggactgggtgtccccaggctgttgggaaaagggtggcacatagggtcccagtgttgggtggtgtgtcgcctgctgtgaaagttcaggacagaggcctcagcctcagggtcacctccctggacaaggtgaatcagaactcacccttgaaggataaacaggatttaagtgaatgaggggacctggacttctgtccgaacaacaagtgtttgctgaggcctcctgtgggccaggcactgggttggccattctagagatggagacattcacccaataaatgtttccagagcattaactacagttaggcacaattctaggcactggaaacatctgtgaacaagataaccatcctcctaccaagactcgggggatagggactttaatgagcgtggcactgtggtggggctagaggaaatcagggaaggtatcacaacagaggcaatcgctgggacctaaaacaagagcctgggggctgggcctccaagttgagggaacagcacgtgcaaagtttgaaaggagagacgccaggagttcggagcgaagcgacgaagttcctccaatccttcctgcccctgtgccagccctgaaggagctgaatgagcaattccaatcgagggcgaaaggggggttggatggagggatgcaacttaaaggtgtatttatttggggcggggaacagcggaagtgagagtagttaccaatgatcaccttatcctaagagtagtgtaccgggcgccccacaagtgtccctatcatgcgttgttgagtctaatttacgtatagggaaactgaagctaggatgaaggagaacagatcaagccaggactctaccgcttatcggccagcctctgcggggatcttgggcgtcaggtcaccagctggctgctgggcagcgacggggcagcgctccctacacggccccgggcgagaggcgggcggggggacgcggaggatgcgcgcgcaacacccgagggtgggaggagagagaacagaaccgcggcgcgcccagaccgcacgaggtcgtgaaggtagccgcgcggaggggcgtggcttcgggcagacaggtcatggggaggcggagttaagggaatttttcagcaagggggcgaggccacttcggaagctgagagagggggcggggcctgccctgcagtcgaacaagcggggcgtggccttgcccgcacttgggcaggcgggggcgtggcccgtctctgagcgccgcggctctgggcttgcgcgcgcgggagtcaggggtcacggcggcgtaggctgtggcgggaaacgctgtttgaagcgggtgagtagaggggaaaaagggagttcggggcagtgggcctggtagggaacggggcttgagcagccaggcacatagatctgagagacggttgcgagggcaccctttggcccgggggcgcgcaggagagggcaggggccaggggtttcctgggcgagggcgcggggacgagcaggaaaaggccggggtgggggtggaattcctcggcgggcagggggcgcatgcgccgggcaccgtggggcgggacgtggcccgggaggagctggggggactgggtggtgcacgtgcgggcttggtgtcatcctggattcgctgggtgtttgagtactctgtgccaggcacttttctggaagcaggaacaagtcagagaagtccctgtctcgggaagacagacggtagacaagtgatgagttttaatagatcagtaaagcagtgctctggggctgtgagatgctctcagaaggaaactaacgcagggtaacgtgataatgagcgaagagcctgttgctttagctggagtggtccagaatcgaccgctctgggaccctcaagtgcaaagccctgaggtggaaggagcttggcgtatttgtagcaggagccgaggggacgagagaaacacagatgaggtcggagtcatgatggggaactagatcctatagggccttgtaaaacttggtatggaatttctcctttattctaggttcagcggggagccgtgggagggtttgagcgtggaaacaacacgattcgccccatgttttgaaaaactcaccactgagtggaaattggattgtagcaggaataagaatggaaggagggagatctgttaggagggagagcgtcctgcaggcagagaatcaggctccggttacctttgcgggcggagacagggggactggctgatggactgggcgtaggagcaaggggaagagtccaggatgactcctgggtttgtggtttgagcagcaggctggatggggaaggctaagggagaagcaggttggggttgccgctctgaaggcaaagattagtgggggagtgagtgggcagggtttagagcggagccaggagtgggcagggcgatgtcagtgcctcgcctcagcccttccactgaaggaacttgttgccactgtcttctcttttttttttttttttttttgagacagagtcttgctctgtcacccaggctggaatgcagtggtgcaaactcagctcattgcaacctccgcctcccgagttcaggcgagtctcgtgcctcagcctcctgagtagctgggattacggcacccactgccatgcccagctcattttttgtatttttagtagagatggggtttcgccgtgttggccaggctggtctcgaactcctgacctcaggtgatccacttgcctcggcctcccaaagtgctgggattacaggcgtgagccaccacgcacggccgcttctcctccttcctgcacttcccccccacaggtctctcttccccctagagaggttccttccctccccctgaaatgctcttccctctcttatgtgtttctgacagctgctgtttggacaggccctctgctgagcactggggagccaatgatcattcagtttggttggggaaggacaggagatttcagtccagagtgcgctgagctatggcggagcagtgatagtctttgggagccaagagaagaacctgtgcgctcagggaagactcaccagagtggttgatattcacagggagtttcaactcacatgtctttttttttttggtttttgagacagggtcttgctctgtcgcccaggctggagtgcagtggcgcgatctcggctcactaacctccacctcccgggttcaagcgattctcatgcctcaggcttccgagtagctgggattacaggtgtgtgccaccacgcccagctaatttttgtatttttagtagagacagggttttgtcatgttgcccagactggtctcgaatccctgacctcaagtaatcctcccacctcggcctcccaaagtgctgggattacaggtgtgagccaccacacccggcctaaactcatgtcttgaagtaaccggacactgtgcagagtgatgctggagaccccaacttgggcaagatgctgactccttttctcaaggagctcacaggctgaaaggatcccagctctgcattgtgcaataacgaaagtggcacaaggcgttgtgggaaccctgaagggcagctggtcagcttggaggagctaagcctgagctgagtctctggatgcagtggagtttcatgcagcgaacactgcctaaggcctcctgggggcccaccctgtgctgggtgatgctaaggtcccagaggagagtcagtccttgctctgccatccagaggtccctggctggtaagggaggaagacacacacccaggcagtccagagacagcagtcacagaggcctaggggaaggacaaggccgaaagcatgcaggtgagcctgggcaacatagcaagaccctgtctctacaaaaaatacaaaagctaggccgggcgcggtggctaaggcctgtaatcccagcactttgggaggccgaggcgggcagatcatgaggtcaggagaccaagaccatcctggctaacacggtgaaaccccgtctctactaaaaatacaaaaaattagccgggcgtggtggtgggcgcctgtaatcccagcactttgggaggccgaggtggacggatcacttgaggtgaggagtttgagaccagtctggcagacatggtgaaactctactaaaaatacacaactagctggacatggtgggcgcctgtaatcccagctacctgcgaggctgaggcaggagaatcacttgagtccaggaggcggaggttgcagtgagcaagatcctttcccaaaaaaatatataaataaaaataaagctgtgagattgggcaagattggatgaggtcattgaggaaatgagtgtctcactcatcgagaaaactggtgtctggcctgcagcgagcacgtggtgtcattttgttgctgaatctctgttaagtgcttgctaccgaagggtcgtgagaggggcagaggacagtgtttgccaagctctcatcctgtgccagggccaatgagaggggacacacaggggcctttccttcctaatgctgctgtgcctccactaacaagagcccaggttttgcccctggtgacaccgtccctcccaccgcacccccgcagccacagccaactgaccaagggcagccagtcagctccttccttcctcctccagcttcagcactgactctgggctcccacaagcccctgcgcttcctctgtcccacccgggtctctcctcgcagatcatcactccctgtccctctctggctacttgcacaacccgaagccagagccgctaacgacgcttgcttcttcctgtaagtcacacatgtacgcggttgtcacccaaagagcacaaacgcagtcaaagtcttcctcacacaaaaccccctgcacacgctcacggctgcaccactcacaaaaggtggaagcaaccctaatgtccatccactgatgaagggatacgtcagacgtgttctagccatacagcggaaaagtactcagcaaaaaagggacacagcactgacgaaaggccgccacacacatgagcgatgaacacattcagagaaagcagccagacacaagaggctgcatattccaagatcccatttataggaaatgcccagaataggcagatccatggagacagaaagttagatgagtggctgccaggggtgggggcagatgggctgaatgcagggagagagctaaaggatttaggctttttggggtgatgagagagttctaaaattgactgtggtgatggttgcctaactctgaacatactaaataccattgaactatatatactttaaatgggtgaattgtatagtatgtgaattatagctcaataaagcagttagcaaatgaagtcttctaccctgtcccccaggaaaccagtttcttagctctccttatagaatgatgcattaaaagcaaatagatttatacatatgccctgcattacaataaaaaagacgtctacatactccctgcattacaataaaaaagacgtctacatactccctgcattaaaagcaaaaagatttctacatactcttctgcccaccttgtaaatttgttactattttcattttatatatttcccccttaatattttgaaaagtttcaaacctgcagagaaggtacaaattgagtacagtgaacagccatggccctttgcctagattcactggctgttggcatgacacctcatttgctttatgctttatccaagcacatgcatatacctgtaccttttgtcctttttttggctgaactatttgaaagttgtggtcatcatgatacttcacctctgaaaactccagcagttaactctttttttttttttttttttttttttgagacggagtcttgctctgtcacccaggctggagtacagtggtgcgaccttggctcactgcaacctctgcctcccaggttcaagcgattctcctattgcagcttcctgagtagctgggactataggcgcgcaccaccacatctggctaatttttgtatttttagtaaagatggggtttcaccatctttgccaggctgctcttgaactcctgaccttatgatctacgtgcctctgcctcccagagtgctgggattacaggcatgagccaccgcacctggcctctttttttttttttggtacagtattttactctgtcatgcaggttgtagtgcagtggggtggtcacagctcactgcagcctcgacctccccaggctcagctgatcctcagcctctcgagtagctgggactaaaggtgtgtgccaccacaccctgctaatttttatattgtttatagagacagggtgtcaccatgttgcctaggctgatctcaaactcctgggttcaagcaatccccctgcctcggcctccaaatgtcctgggattacagccgtgagccaccgtacctggcctccagcagtcagctcttaagaacagggatgtccgcctgcagaactacagtgtcattgtcatcatcatgcagtttaacatgagacagtgacgttattgaatagacgattcttatttagatctgccacgtgtccctgtaatattcttcaaggctataaataatttcttattttttttttttttccaagactgagtcttgctctatcgcccaggctggagtgcagtggcactatctcggctcactgcaacctctgcctcctgggttcaagccattctcttgcctcagcctcccgaatagctggaattacaggcatgcaccaccacgcccggctaatttttttgtattttttgtagagacggggtttcattttggccaggctggtctcgaacccctgacctcaggtgatccgcccgccttgggctcccaaagtgctaggattacaggcgtgagccaccatgtccagcctgtttttttttttgttttttgttttgttttttttttcttttttgaaacagagcctcattgtcacccaggctggagtgcagtggtgcgatcttggctcactgcaacctccacctcccaggttcaatcaattctcctgcctcagcctcccgagtagctaggattacaggcgcctggcaccacgcccagctaatttttatatttttagtagagacagggtttcaccatgttggccaggctggtctcaaactcttgacctcaggtaatccacccacctcagcctctcatagtgttgggattacaggtgtgagccactgcgcctggccaataatttctttttttcttttcttttcttttttttttttcaagttacatgaagtaaatttattatttacagctaggcaacaagggaaaaccgaagcataggattcattgtgagccaatctcccgagactcaggaaggttgccccgggaggatggagtctcatttgtgtgtaccccatttgtacctggaaagcagaccatcttgggttttatattctggaggcaacatgacatgttgggctaaaatgatgaaggacatcctgtttctaggagggactggaacagagcctgggctgtttcagccagtccctccttatctcaggatattgcattcctagcacattctacagttattcttgagaactattttttttttttttttagtatttattgatcattcttgggtgtttcttggagagggggatttggcagggtcataggacaatagtggagggaaggtcagcagataaacaagtgaacaaaagtctctggttttcctaggcagagggccctgcggccttccgcagtgtttgtgtccctgggtacttgagattagggagtggtgatgactcttaaggagcatgctgccttcaagcatctgtttaacaaagcacatcttgcaccgcccttaatccatttaaccctgagtggacacagcacatgtttcagagagcacggggttgggggtaaggccgtagattaacagcatcccaaggcagaatttttcttagtacagaacaaaatggagtctcctatgtctacttctttctacacagacacagcaacaatctgatctctctttcctttcccatttcccccttttctattcgacaaaaccgccatcgtcatcatggcccgttctcaatgagctgctgggtacacctcccagacggggtggcggccaggcagaggcgctcctcacatcccagacggggcgtcggggcagaggcgctccccacatctcagacgatgagcagccgggcagagacgctcctcacttcctagacgggatggcggctgggaagaggcgctcctcacttcccagactgggcggccaggcagagatgctcctcacttcccagacggggtggcggccgggcagaggctgcaatctcggcactttgggaggccaaggcaggcggctgggaggtggaggttgtagcgagccgagatcacgccactgcactccagcctgggcaccattgagcactgagtgagcgagactccgtctgcaatcccggcacctcgggaggcccaggcgggcagatcactcgcggtcaggagctggagaccagcccggccaacacggcgaaaccccgtctccaccaaaaaatacaaaaaccagtcaggcatggcggtgcgtgcctgcaatcccaggcactcagcaggctgaggcaggagaatcaggcagggaggttgccgtgagccgagatggcggcagcacagtccagcctcagctcggcatcagagggagactgagaggggggagggggagggggagggagagggagaggtctttttttttcccactcccccgctcttgttgcccgggctggagtgcaatggcgcaatcttggctcactgcaacctccgcctcccaggttcaagcgattctcctgcctcagcctcccaagtagctgggattataggcgcccgccaccatgacaagctaatttttgtattttttttagtatagacggggttttcaccacgttggccaggctggtcttaatctcctgacctcaggtgatcggcctgcctcagcctcccaaagtgctaggattacaggcgtgagccactgcacctggcccatcattttacttttttaatccaagttctaacctaggataacacacattgtcatggcaactttttcattttttaagacatgtcttgctctcttgcccagactgtattgcagtggtgcagtcatggctcactgcagccttcacctcccaggttcaagtgatcctcccacctcagtctcccaagtagctgggactgtaggtatgcaccaccatgcttaagtaatttttaattttttgtagagattgactaatttttaattttttgtagaaatggagtctcaccatgttgcctaggctagtttctaactcctggcctcaagtgatcatcccacctcagcctcccaaagtgttgggattacagacgtgagcctcctagcccaggcaacttactttttcatgacatcgacagttttaaagattacagaccagtgttgtcacccctcaccttggattcgtttgtttctttttcttgttttgttttgagacagagtcttgctctgtcacccaggctggagtgcagtggcgtgatcgcagctcactgcaacctctgcctcccaggttcaagtgattctcctgcctcagcctcccaagtagctggtattacaggcacccaccaccacgcctggctaatttttgtattttagtagagatggggtttcaccatgttggtcaggctggtctggaactcttgacctcaagtgatccaccctccttggcctcccaaaatgctgggattacaggcgtgagccactgcacccaggctgtttgtttcttaatgactagaatcagggtaaacgttttcttagacattgtttttcaacacaaaagataaaattgtgagtgcaccactgtgcatcttgctttatctactgaacaatgcctctttgagaaccttccctatcagtacacaaagagcttcctcattcctttacacagttgcatagtattccattgaacggacttaacatatttaaatagccccctgggggaggacagttaggtggtttccagtccttggggatttcaaacgatgcttccggaaataaccttataaatgcagtttttcttatgtgataatatatctacagtgtacgtccctagatgtggaattgagcctccaaacttttatgtttataattgaggtggcatttacatggcgtgccatgcccaggtctccagtgtacagtcagctgtatagtgtgttttatcaccccagaaaccccctcatacccttcccagtctctcctaccctaggagcagccactagtctgatttctagcgctgtagatcactttagtgtattctacaactttgtctaaatggtattgtacaatttttatggaggtaaaattagccattttaaagcaaacaatggctgggcgtggtggttcatacctgtaatcccagcactttggggaggccaaggcaggcagatcacttgagcccaggggtttcagaccagcctcagcaacatggcaaaacccgtctttaccaaaaaacaattggctaggcatggtggcacgcatctgtcttcataactactcaggaggccaaggtgggaggatcacctgagcccgggaggtcaaggctgcagtgagctgagatcatgccactgcactctagcctgggcaacagagtgagatcctgtctcaataaagagagaaagtaataataaagcaaagaattcagttggtacgttcacagtgttgtacaaccattacctctgtctagtttcaaaacatttcatcacccctacagaaaaccccatactccgtaagcagtcactcctcattcccccagtgtgcactttgccttctgcacagcctgctttcaagattcatccgtgttgcatgtctgtcaggagctggcccctctctaatgctgagtgtctgttatgaacctccctgaacatttctaacatatactccatcagttcagaatttttccatgcttatttcaggtctaagctgttgtaccaaggagcccccaaaacacagtggcccaagaaagatacaaattgatttctccacataacgctttggaagataggcaagtgtgcagggttggcagacagctttgctctggaaggttgttggggagcccagtgttgtccctgtccttgtggttggctctcccactacatccatgttccagccactgtgacggggaagagggtgggaggatgtcccagtagctgcacacctcatgatcactctcattcctggagggagaacttagtcacgtggccctcctggcagcgcacactgggaaatgtagcctttggctgggcagcctgtggccactccggacacgcagggttggaggggtgtgttctattgcaaaaaagcaaagcaaagccgggcgcggtggctcacacccataatcccagcactttgggaggccgaggcgggcggatcatctgaggtcaggagttccacaccagcctggccaacatggtgaaaccccatctctactaaaaatacaaaaaaaaattagcgggtatgatggtggacgcctgtaatcccagctactcgggaggctgaggcaggagaatcgcttgaagccaggaggcgaaggttgcagtgagccgagatcagccactgcattccagcctgtgtgaccgagtgagactccgtctaaaaaaaaaataagtaaaataaaaaggcaaaatgaggactggatatggggcaaccgttatgagatccagggatagacagctgacctgctcacctgcctcttcccagccgcatctaggatctgccctaggttccagtaatcccctctgtctcagcctggaccctgggggacaagtactttgtttttgtttgtttgttttttgagacagaatttcacccttgttgcccaggctggagtgcaatggcgcagtcttggctcactgcaacctctacctcccaggttcaagggattctcctgcctcagcctcccaagtagctggggttccaggtgtgcgccaccatgcccagctaattttttttttttttttttttagtagagacagggtttcaccatgttgataaggctggtctcaaacaactgacctcaagtgatccacccgcctcggcctctcaaagtgctgggattataggtgcgagccacggtgcccagctgggtacaggtactttttaaaaacttctttctctgacaatttcaaattaacaggaaggttgaaagaataaatagtgtaggccgggcgcggtggctgggtacaggtactttttaaaaacttctttctctgacaatttcaaattaacaggaaggttgaaagaataaatagtgtaggccgggcgcggtggctcacacctataatcccagcacttcgggaggccgaggcgggcggatcacgaggtcaggagattgagaccacagtgaaaccccgtctctactaaaaatacaaaaaaattaggcgggcgcagtggcggacgcctgtagtcccagctactcaggaggctgaggcgggagaatggcgtgaacccgggaggcggagcttgcagtgagccgagatcgcgccaccgcactccagcctgggagacagagcgagactccgtctccaaaaaaaaaaaaaaatagtgtaaagaacacctgcacgccctttgcccagatcacctgtttcaacattctgtcctatttatgatttgcatggatgtttcttatctcccttctctctgtatacgtacactcactttttacaaagaattcccaataccttgcagacattatggccgtttactcctaaatacttgagtgtgtatctccttagaatattcttattgaaccacaataaagtcacccacttaagtttaacctgcatataaccttgtctaatcaaccagaggatatatactttttttttttttttttttttttttgagacagggtattgccatcttgtccagtccagtcttaaactcctgggctcaagcgatcctcccaccttggcctcccaaagtgctgagattacaggcataagccactatgcccagtgaacttttttgttgtggttgtttttttgtttgtttgtttgggttttaattgttgttgttggtggtggtttttttttgtttttttttttgagacagaatattgctgtgttgcccaggctaaagtgcagtggcgcgatctcggctcactgcaacctccacctctcgggttcaagtgattctcctgcctcggcctcccgagtagccataattacaggtgtgtaccgccacacccagctaatttttttgtatttttattaaagatagggtttcaccatgttgaccaggctggtctcgaactcctgacctcaagtgatccacccgcctcagcttcccaaagtgctgggattacagcgtgggccaccgtgcctaactctagtcaacttttatattgtatatcttgtacattgtatatcttgtcaaggatattgtatatcttgtcaaaatacacccccaaaataataatatatatatatattttttgagatggagtctcgctctgttgcccaggctggagtgcagtggtgcaatctcagctcactgcatgctctgcctcctgggttcacaccattctcctgcctcagcctcatgagtagctgggactacaggcgcccaccaccatgcccggctaatttttttgtatttttttagtagagacggggtttcaccatgttagccaggatggtctcgatctcctgacctcatgattcacctgcctcctaaagtgctgggattacaggtgtgagccactgctcccagcctccaaaataatcttttataggttgtaattaagaaaacacaggccaggcttggtggcttacgcctgtaatcccagcactttgggaggccgaggcaggtggatcacctgaggtcaggagttcaagaccaggatggccaacatggcgaaaccctgtctctactaaaatacaaaaattagccaggcatggtggtgggcacctgtgatcccagctactcaggaggctgaggcaggagaatctcttgaatctgggaggcggaggttgcagccaagatcgcaccactgcactccagcctgggtgacagagcgagactccatctcaaaaaaaaaaaaaaaaagaaaacacaggccaggcttggtggctcacgcctgaaatctcagcactttgggaggccaaggcaggtggatcacttgaggtcaggagttcaagaccagcctggccaacatggtgaaaccccgtctctactaaaaatacaaaaattagctgggcatggtggcgcgtgcttgtaatcccagctacttgggaggctgaggcagaagaattgcttgaactgggtcccgggaagcggaagttgcagtgaatcgagattgtgccactgtactccagcctgggcaacaagagtgagattctgtctttttttttttttttttctgagacggagtcttgctctgtggcccaggatggagtacaatggcacgatctcggctcactgcaacctccgcctcccaggttcaagcaattctcctgtctcagcctcctgagtagctgggattacaggcgcctgctacctcacctggctaatttttgtatttttagtggagatggggtttcaccatgttggtcaggctggtctcgaactcctgacctcgtgatccgcccaccttggcctcccaaagtgctgggattacaggcgtgagccatcacacccggccctgattatgtctttaaaagaaagaaaaagaaaacacaaatatatataagtagcagtctgtatgtgttttgtgttgtgttttgtttgctactgtgggtcctggactcggggagaaagcaggttactataaacggcattttggagacagttggagaaattgggaaaggtgccctttattttatatcaaccttgagtcagtgttaaatgtcctagattgtatcgtactgtgctcggtgaaaggaattccttattgttaggcactacgtgctaacatgtggaggggtatgggatctgcaaggaactctcaaattactcaggaaaagaagtaacaatatgatgtgcataccgcacatgtgggagggcagagagaggcggtgagagagcacacacacgacacgctgaccaccggggagcctggggaagggcatacaggagttctaggcatttgagattatttcaaagtatttaggttggtgcaaaagtaattgcagtttttgtcatttcaatggcagatggcctgggcagatgggtggttggtaggcgaggtatcggagacagaggtttatggaaaataaagagatgtgccaaggccgggcgcggagactcaggcctgtaatctcagcactttgggaggctgaggcgagtggatcacctgaggtcaggagttcgagaccagcctggccaacatggcaaaaccccgtctctactcaaaacacaaaaattagctgggtgtggtggtgggcgcctgtaatcccagctactcgggaggctgaggggagaatcgcttgaacctgggaggtagagcttgcagtgagccgagatcatgccattgcactccagcctgggtgacaagagcacaattccatctcaaaaaaaaaaaaaaaaaaaaaagcaagagatgtgctaaggacctagtgtgatgggagagagggtcggggagtcgacggggctgctgctgcagtagctaacaattgagcgtctggaatgtgctcccaccccactgcctgcagggtgcagagagctatgttagtacagccagtccagagtaggaaaaggctcgtggtcatggtgggtgcatgggatgccatggagacagggtaagaggtgtctccggtcagaacctccaccaagctccaacttgcccagcaggatggatggcaagcggcggccaggcccagggcccggggtgcccccaaagcgggcccgtgggggcctctgggatgatgatgatgcacctcggccatcccaattcgaggaggacctggcactgatggaggagatggaggcagaacacaggctgcaggagcaggaggaggaggagctgcagtcagtcctggagggggttgcagacggtaaggcttggagttggaggttcctgctgcccaacccattgcccctggtcttgcctttggtccaagagtcagctgcaaagctgacctgtgaccccactctggccaattttgaatcctacaaaggactgcccttccaccccgtgcagcctgtgtggcctacagtgattctggccctgacccttgaccctcattctcttccaagtttcctgcctgacccagaccaccacctctgcctggctcctttcagaaccacatgccatcctggccggggaagaccatgactccatgtactccacttccttcccttcccccaccagggcaggtcccaccatcagccatagatcctcgctggcttcggcccacaccaccagcgctggacccccagacagagcccctcatcttccaacagttggagattgaccattatgtgggtgagtttaggggttatgggtgagtgctggggccctgcgctcctggggcagaggccgggccaggtcagcccctctggccctgtgctcctggggcagaggccgggccaggtcagcccctctggctctgcccctctggttgccatagagctgtagtgacagaacagaccagtgggtgccaggggttgtggagtgcgaagcgaaggtgacacagggtcagcttgagggaggtgcttggagcgttgatctgttttgcatacgtagtagctgcagcctgtgcaaggacctctgtgccttaaaattcataacaccagacacataaaccaaaagtcaatttgacttcttttttttgagatggagtcttgccctgttgcccaggctggagtgcagtggtgtgatctcggctcactgcaacctctgcctcccgggttcaagtgattctcctgcctcagcctcccaagtagctgggattacaggtgcacaccaccatgcctggctaatttttgtatttttagtagagatgggcttttgccaagttggctaggctggtcttgaactcctgacctcaagtgatccacccgccttggcctcccaaagtgcttagattacaggtgtgagccattgtgccagcccaatttgactttttaaaagattttttttttttttttttttttttttttgagacaagattttcctctgttgcccaggctggagtgcacctggccaataattttttttttttttttttttttttttaagatggagtcttgctcctgtcgcccaggctggagtgcagtggcacactcttggctcactataacctccgcctcctgggttcaagtgatccttcttcctcagcctcccaagtagctgggattacaggcgcccgccatcacgcccggctaatttttatatttttagtagagacagggtttcgccatgttggccaggctggtttcaaactcctaacctcaggtgatctgccgaccttggcctcccaaagtgctgggattacaggagtgagtaactgtgccccgcctattttttttttttttttttttttttttttgagacagagtctccctctgtcacccaggctggagagcagtggcacaatcatggttcactgtaacctcaacctccagggctcaagtgatcctcccacctcagcctcggagtagctaggactacaggtgtgcaccacaatgtctggctaactttttttttttttttgagacggagtcttgctctgtcacctaggctggagtgcagtggcgcgatctcggctcactgcaagctctgcctcccaggttcacgccattctcctgcctcagcctcccgagttgctgggactacaggcacccgccccaactcctggctaattttttgtatttttagtagagatggggtttcaccgttttagccaggatggtcttgatctcctgacctcgtgatccgcccgcctcagcctcccaaagtgctgagattacaggcttgagccaccgcgcccggcctggctaacttttaaaaatatacttttgggcccggcatggtggctcacttttggaggctgaggcaggctgatcacttgaggacaggagttcaagaccagcctggccaacatggtgaaaccccgtctctactaaaaattcaaaaaattagccaggtgtggtggcatgggcctgtaatctcagctgttcaggtggctgaggcacaagaatcctttcaacctgggaggtggttgaaatataaatataagatatatatatatgatatattctttatgtattaatttatgtataacatatattatatattaatatattttgtagagacaaatatatttatttgtacatataatatgtgtgtgtatttgtgtatatgtgtatatatatatatatatatatatattttttttttttttttttttttttcttttttttgagactgggtctcgctcttttgcccaggctggtctcaaagtcctgggctctagcgatcctcccgccttggcctcacaaagcactggaatcacaggtgtgagtcactgtgcacggccagttgtttttatcttgtaataaaaaagaagggcctccctgtagttgtgctgtggagaatggatcctgggggatgaggctggagatgggaaccaggggggaggctgaaatggacacagggaacggtacaggggcaggagtgccccaggctgcaggccccaaggtatttcgaggctgtggagacacaccttggaggaccctgagaggcatggccgctgtcttaccctgtgaccccacaggcccagcgcagcctgtgcctggggggcccccaccatcccgcggctccgtgcctgtgctccgcgccttcggggtcaccgatgaggggttctctgtctgctgccacatccacggcttcgctccctacttctacaccccagcgccccctggtgagtggcccctacccagcccctccctgagccactggagccccctgcacctctgatcatccctcccacaccaggtttcgggcccgagcacatgggtgacctgcaacgggagctgaacttggccatcagccgggacagtcgcggggggagggagctgactgggccggccgtgctggctgtggaactgtgctcccgagagagtgagtgctcccccaggatcagcgggttggagggtcccctcgggaggccattggctggtcccagcttcttccatccacaggcatgtttgggtaccacgggcacggcccctccccgttcctgcgcatcaccgtggcgctgccgcgcctcgtggccccggcccgccgtctcctggaacagggcatccgtgtggcaggcctgggcacgcccagcttcgcgccctacgaggccaacgtcgactttgagatccggtacggcctctgcctcacttctccggcctctatccccaccctcgggcagcccctgtccactgacccccagccccctccaggttcatggtggacacggacatcgtcggctgcaactggctggagctcccagctgggaaatacgccctgaggctgaaggagaaggtgcagggcttcccagggcagggctgggtggggagctggtaccctgctgccaccgctgacccacccatgcccacaggctacgcagtgccagctggaggcggacgtgctgtggtctgacgtggtcagtcacccaccggaagggccatggcagcgcattgcgcccttgcgcgtgctcagcttcgatatcgagtgcgccggccgcaaaggtctgtccccgggcccgggctcctgcccgcctcattgatgtgccaagtcgggggtcggaaaggcaggtccggtggagggaatggcaagcatgaaggtgccggggcaggagcaccccagcccatgtggccagatggagtgagcacagagggtgtggagatggcctggaggtgagagcagagcaggagccagggtgagccacgtagggccggcaggcagcggggacagccccggggagatggcaggtgcagcctccctgctgtgttgggagtgaggggcaggagtcaggcccctgcatcctcctgcctcgcaggcatcttccctgagcctgagcgggaccctgtcatccagatctgctcgctgggcctgcgctggggggagccggagcccttcctacgcctggcgctcaccctgcggccctgtgcccccatcctgggtgccaaggtgcagagctacgagaaggaggaggacctgctgcaggtagctctcgctccacgccccacaccatttcccggggtccccgccagcctccgcgtcctgagccatcagctcctgggtgctgcgacgcccatgtctgtgggtctgggtgggtgtctgtgggtctgggtgggcccctgtgcaattaggcttgagcacttcccctctgggttctgcaggattttcaggggtggctggggttctagaacattctggaagtaggggaatccgaggcagggcaaccaccagggtgacccaatgtgctcccacccccaggcctggtccaccttcatccgtatcatggaccccgacgtgatcaccggttacaacatccagaacttcgaccttccgtacctcatctctcgggcccagaccctcaaggtgagggctgggcaggtgggaggcttctctcagatgccccaggtgtggcctccgggccctgggcctccttcccactccctctccacatggcttggtgcatcttgctctgtgtgcctcagccgattgcctgcaggggcagcctaggcctggtcctgccctgctccaagtcgaaaaagttactgtggcttttatcagaggcaaggagggcgttacggtggagtaagagaaggctgtgcattcaaggtcggcctgaagcttgcaggggttcaacaagccatgaagcagccactgaatcccagtcttcctttaggttatatcagcataaggaaaagaatcataatggaggaggaggggggagtgtgttgactgatggggcaaattccggatgcttcttgagtctgcatgtgtgtaagggtggattcctctgcccgagttgctgtaacaaagagccacagaccaggtggctgaaaacagcaaaaagtcattgtctcaccgtcctgaaggctggaaagtccatgaccaaagtgtcagcgggcctgcttccttcgggggctgcaagggaggactggttcacggcctctctccttggcttgcagacggccatcatccccctgtgcctcttcacaccgtcttctctctgtgcgtgtctgtttccacatgtcctcccttttttttttttttccaagacaaagtctcgctctgtcgcccaggctggagtgcagtggcgcaatcttggctcactgcaaactccgcctcccaggttcatgccattctcctgcctcagcctcccaagtagctgggactacaggcgcccgccaccacgcctggctaattttttgtgtttttagtagagacggggtttcactgtgttagcgaggatggtcttgatctcctgaccttgtgatccgtctgcctcggcctcccaaagtgttgggattataggcgtgagctactgcacccaaccccttttctctttcttttttttttttttttttttttgagacagagtctcgctgtgtcgcccaggctggagtgcgatggcacgatcgaggctcactgcaacctccacctcccaggttcaagcgattctcctgcctcagcctcccaagtagctgggattacaggcgtgagccaccacgccccgcaaatttttgcttttttgttattgtttcttgagatggaatttcgctcttgttgcccaggctggagtgcaatggcacgatcttggctcaccacaacctccgcctcccagggggcgctggggtgtagaagtgattctcctgcctcagcctcccaagtagctgggattataggcacccgcttccatgcccgactaattttgtatttttagtagacagggtttctccatgttggccaggctggtctcgaactcccaatctcaggtgatctgcccacttcggcctcccaaagtgctgggattacaggcgtgagccaccgcgcctggcctatttttgtttttgtttttgttttttttagcagagactaggtttcatcatgttggccaggctggtctccatcctcacctcaggtgatctgcccacctcagcctctcaaagtgctgggattacaggtgtgagccagtgcacctagcccacatgtcctctttgtgtagtgacaccgtcgtgaggtgagggcccaccccagtgacctcatcttcacttgaccccctgcgaagacatatttccaaatgaggttacattctgaggtgccgggggttagggcttcaacatcttttgggagaacatggttcagcccttaatgagatatattgccttattttcctgcttttctctatgtctggccagcttggtaatggaaaaacaaaacaggctgggtgtggtggctcacgcctctaatcccagcactttgggaggatgaggcgagaggatcgatggagcccaggagttcaagaccagccagggcaacatagcaagaccctgcctctattaaagagaaaacaagaaaaaatccattctaaaatacagaacaaactcttaggacccccagtgtatattccacagcgtggcgctgatgcccgggccatggtactcctcctccccttccctgggtgtccctcaccctctgccctgtccccagctcaggcttcttctggcctcagtctcccccaggctgggccccagcaccctgcaaggcctcctgcagccaggcgccctccagcgccctcagcatccatctcagcccagctccacgccgcctcctgcctctgcccccacctggccgcctgctcacagtgtccccaaatctcttcctgtttcctgcctaggtacagcccgcagacactgggctccatccttggcccccagtccatcagggcccctgactctcgctatcccagccttggctgcagcttagtccttactccggactccctccccagtctccagccacccacacccagccccagaccgtctttctgcccccagggttgctctcgaccccctagggttgttataaggatgttgtggttggtctcaatctccgttcttcaggcttatgtgacggggacccgcagcctgctgcacaccctgcctctcctcctcaggtacaaacattccctttcctgggccgtgtggccggcctttgctccaacatccgggactcttcattccagtccaagcagacgggccggcgggacaccaaggttgtcagcatggtgggccgcgtgcagatggacatgctgcaggtatgggcgggaggtggggtgtgtccctgtccttggaaggccactgcccaggcccgcagcccaccagcccacccacccacctaggtgctgctgcgggagtacaagctccgctcctacacgctcaatgccgtgagcttccacttcctgggcgagcagaaggaggacgtgcagcacagcatcatcaccgacctgcaggtgcctgctgcctccctgacctctcaccccaacctctgacctccacctcacccttccccggcctctgacctcaacttcacgcccccacgtctgacctcactctttgacctgctgttatgacctgtgaccttacctgacgcccactttttcctgacctctgaccccagatttctctccactcctgtgacctctgtcactatgaccttgtctctgctttcctggcctgaccacaggtccacggtggccttcaggctgctccctcctcctccctctggccctgtggactccctggcccccaaccctacctccatccccacccagaccctgacgacttggagggccctcctgcccgcctcacctcccaggccctccccaggctacctcaccctgacccccacttccttctcctgctccacctcccacccccaacccctggtccctgaccccatccgtgcccatccccagaatgggaacgaccagacccgccgccgcctggctgtgtactgcctgaaggatgcctacctgccactgcggctgctggagcggctcatggtgctggtgaacgccgtggagatggcgagggtcactggcgtgcccctcagctacctgctcagtcgtggccagcaggtcaaggtcgtatcccagctgttgcggcaggtcagtagccgagacttgtcctcgccaccccccaccaggcacgtctgtggccccctccaggcaatggcatcctggatgcactttttctccccactcccaatccgcacggccccacctatacccactccatttcccaccttctcccctcccaggccatgcacgaggggctgctgatgcccgtggtgaagtcagagggcggcgaggactacacgggagccactgtcatcgagcccctcaaagggtgaggccccaggctgggtgcagtttttacctgtaatctctgggaggctgaggtgggaggatcacttgagctcaggagtttgagaccagccagggcaacatagcgaggcccctgctccacaaaatttttttatttttatttatttttatttttatttttttgagacagagtctcgctctgtcacccaggctggagtgcagtggcgcaatctcagctcactgcaagctttgcctcccgggttcacgccattctcctacctcagtctccacagcagctgggactacaggcgcccaccaccacgcctggctaatttttttttttttttttttttttgcatttttagtagggacggggtttcaccgtgttagccaggatggtctcgatctgacctcgtgatccacctgcctcggcctcccaaagtgctgggattataggcgtgagccaccgtgcccggccgaaaaaatttttaaaaattagccaggcgtggtggtgcatgcctgtaatcccagctacttgggaggctgagctgggaggatgatgagcccaggaggtggaggctgcagtgagcgatgattgcgccactgccctccagcctgggcgacagagcaacaccccggccctaaaataaattaataggccaggcacggtggctcacccctgtaatcaatcccagcactttgggaggtcaaggcaggcggatcacaagttcaggagattgggaccatcctggctaacacggtgaaaccccgtctctactaaaaatacagaaattagctgggcatggtggcgggcgcctgcagtgccagctactcgggaggctgaggcagaagaatcgcttgaacccgggaggtggaggttgcagtgagctgagattgcgccactgcactccagcctgggtgacaaagcgagactccgtctcaaaaaaaataaaataaaataaaatagtagattaattatatatattatttttctttttctttttctttttttgacacagggtctcactctgtcacccagggtggagtgcggtggcatgatcttggcttactccacctcctaggctcaagcaatcctcctgcctcaggcccctgagtagctgggaccacaggcgtgcaccaccacacctggctaatttttaaaatttttttgtagagatagggttttgccatgttgcccaggctgatctgaaactcctgagttcaagcgatcctcctgcctcagcctcccaatgtgctgggattgcaggagcgagcactgctcccagccaatgaatgattttttttttttaaagggtgaggccacaagacagggcgggggcggcatgggaactcctagccctgactcccggccgcggctgctcccctcccaggtactacgacgtccccatcgccaccctggacttctcctcgctgtacccgtccatcatgatggcccacaacctgtgttacaccacgctccttcggcccgggactgcacagaaactggggtatagtgcccaattcagcatgtgtcccccgaggcccatctgggccttcccttggggggctcagtctggtggggggcataggcacaggcccagagatagtagggagtggaggggtgcttgaggggcctgcgtgtgctcatggccaaggccaggaccgtagggcagaggtgggctggagcaggagggtggccggcagtcaccccaacatcttccaacccagcctgactgaggatcagttcatcaggacccccaccggggacgagtttgtgaagacctcagtgcggaaggggctgctgccccagatcctggagaacctgctcagtgcccggaagaggtgagccctggagatcgcctgcttggagctcagacctgttggggcctctgggcaatccctgtccctcactgggacaccccagggctgcccagccaccctgccctcagctgtgcgtgaattagcacaaggcatcccctcctggcagcttccttttgcccccttggccagaagcttctgtgcagtgcacagtacgcccaaccgtacatggcactcacttccagaaaggagccctgaccaatgcccaggtgccgcctgagtgtgctttccccgtgttccctcgcagggccaaggccgagctggccaaggagacagaccccctccggcgccaggtcctggatggacggcagctggcgctgaaggtgagcgccaactccgtatacggcttcactggcgcccaggtgggcaagttgccgtgcctggagatctcacaggtgggcactcgggcccctggaaggcaactgggggcaggtgggccccctgtgtaggagaccagggctccatgtgggggacctgtatccagaggactgggcaccccaactcactggccttctagagagaggatgccaatgtggcttgagcaattggtccattccttcactcagcaaatgcctactgagcacacactgtggtcagggctcactctgtgccctggggatacagaggggaacaaaatggatgagagctcctgtccctgtcatcttgcagcccagtggggacactgacaggtctgtgtaaacgtgtttaggacacaagtggcgctacgagctttgcagccggataaagcaggaggtgcggactgtcggggagtgatggggctgggcgggactcacccctctcaataggcgacgctcacacagaggccaagggacgtggggagggaagccattcaccgtccccacggcagcgtcccggtctgcctacccacggcagctctgctgcttgaacagaaaaacagattctttgaaaccacagagggcctgagtttccgagattgccaagctggggtcagtgccccagctcctggcatatgagggcctcggaagggtcttcctgtccagccttctcccctgggacttgagtcttggcccattccaggccagtagttgtgctgctctgcttggttacctctagccacggggagctccctctctggctgggcactgcgccacttttcacagggctctgggtggaaggcttggatgaattctcagtgggtggggcctttgcacacacccacccacccgcagttctgggggtcccaaagaccacttaggttcagtgattcactagaagtactcagagagcagaaaagctggttctcatggttatgatttaatacagcaaaaggacacagattaaactcagcaaaagaaagaggtgcacagggcagggtataggagggaccaggcgtgtcttccagttgtgctctcccagtagagttgccaggctggccctccttcctcccagttttgatgcgtgcctgcacacatgcagcattgccaaccagaggctctcacccaagctttggggtccagggtttttcttgggtgtcagtcctataggcatggagcaccctgtgactggccttagtgactccatcatccccaggcccctcagcaacccccagaggtcaaactgatactgcatggcccagggccctaccataaaccatgttagtgtcaactacctggtgtggttcaaagtcccaggtacacaaacaccttttttttttttttttttgagacagagtctcactctctcacccaggctggagcgcagtggcacaatcgtggctcactgcagcctcaacctccgggactcaggtgagcctcccacgttagcctcccaagtggctgggactgcgggcacgtgccacctatttttgttattttttgtagagatagggtctcgccatgttgcccaggctggaacagagacactgttatcaggcgggatattctaggggcttagactaccaggagccaggcaagagccagacctttctttgcacaaagtgaatcgctcactgcatgctcccaactcccctctgcctttcacagtccccggctgcctccccagcctccttggtggaaaggggtggctgtgtggacatcaggctctagccctgaagcagaggccaggccaagagagcacagcttggccctcccctggggctgcctcttaccaatcctgtgtctctgtcttttctctctcagccgcttccctctgtcactgttctgtttctgtctcttgacctctttccttatttctgtctctcaagcttatgggagcaagaggtggaataataaaaatgcaatgaattggctgggcgcggtggctcacgcctgtaaccccagcactttaggaggccgaggcgggcggatcacgaggtcaggagttcaagaccagcctggccaacatggtgaaaccctgtctctattaaaaatacaaaacattagccaggagtggtggcaggtgcctctaatcccagctactcgggaggctgaggcaggagaatcgcttgaacccaggaggcagaggttgcagtgagccgagattgcgccagtgcgctccagcctgggcaacagagcaaaactccgtctcaaaaaaaaaaaaaagtaatgaattacagtgttcacgcctgtaatcccaacactttgtgacactgaggagggaggatcacttgaggccaggggtttaagaccagcctgggcaacatagtgaaaccccatctctacaaaaaatacaaccaaacaaaactagccaggcattgtggtagctcatgcctgtagttgcagctactcaggaggctgagacgggaagatggcttgaacccagcagtttgagttacagtaagctgtgatggcatcactgcactccattctgggtgacagagttgagaccctgtctcttttagtttttgtttgtttgttttgagatggagtcttgctctgtcacccaggctggagtgcaatgccacaatcttggctcactgcgacctctccctcccgggttcaagtgattctcctgcctcagcctcctgagtagctgggattacaggcacccgccaccatgcctggctaatttttgcatttttagtagagacggggtttcaccatgttggccaggctggtcttgaactcctgacctcaggtgatccacctgcctcggcctcccaaagtgctgggattactggtgtgagtcaccacgcttggcctcctgtctcttaaaaaaaaaaaaaaattgaatcatttcaggaaaagattacaaaggaaagaaaaaggaacataggacaggtggaacaagtaaaagctagacagtaaagtggtagacgtaagcccagctatatcagtaattacactaaatgtaaatggacaaaatgctctagttagacagatttcctgactggatccacacaaacaaaaacagaagaatcacacccatctctccttggtgtccccacccccagcctcaggtttggtggtggtggtggtggtggtggtgttgttgtttaagtattttttagttttgtgtgtgtgtgtgtgtgtatttttagtagagatggtgtttcaccatgttgtccaggctgatctcgaactcctgacctcaagtgatccagccacttcagcctcccaaagtgctgggtgtacaggcataagccaccacgccagctagttttcttaactctaaaataagacagtgggtttctcaatggtttcttagtcagggtggtgccaccccctgctctggggggcatttgtcaatgtgtaggtagggccagttctggtggtacagggatgggggtggcactgctggcttccagggatggggctggctatgtcggtggtcctgtaccatagagagctgcccagaatgtcagtgtgagggaaacactgggccagtggcctcttcaggccgcagtctttccagcatgcatttgatgtagtcacttccttgtgcatgtccagaactctgagccagggaacccacttctttccacctgaccattgaggagccgccttatagtcccattttgcagatttgggaactgaggcccaggaggggcagagtggcttgtacataagcctatgccactgggaaatggcagaggcgggacccctcccccgccggcccacgttcactgcacatggcccccagggcttcactccgcatgattctctccccgacagagcgtcacggggttcggacgtcagatgatcgagaaaaccaagcagctggtggagtctaagtacacagtggagaatggctacagcaccagtgccaaggtcgggggctgcccaccgctgccctgagatgggcccagggcaggtggggggatggaagccgggccggacccccatgtccccgtgcctcctggtcacaccctgcccactctcctgttgcatccttgggtcccgttggcattagccacctgccaccccccgacaccagtagttgacagaagggaccctgcttctcacatacacacatccccaccgcccgcaggtggtgtatggtgacactgactccgtcatgtgccgattcggcgtgtcctcggtggctgaggcgatggccctggggcgggaggccgcggactgggtgtcaggtcacttcccgtcgcccatccggctggagtttgagaaggtgcgtggctgggtcaggggctctgcatttaggtgccctcatcagggtactcagggtgtcccgttctttgggttcacaaaagccacagtgtgaagggatgttgctgcttagattctcctgaggctggggccttggtttgggaagcctccaaggccttgggctttgttaccctggatggcatctgttctttgaaaaccctgtcgctgtccctggttttgaggtgtcacagtgtccctggttttgaggtttcccagtacctgtcagatgtggagctgccctccacgcagggaccctgatgggggtgcaccttagatctgtgcaccattgcccctggccctctgagtgcggcacacttggtcccaggaaaccttgcaccatattttcttttgaagagtctgggtctcgctctgtcgcccaggctggagtgcagtggcgagttcacagctcactgcagcctccaactcctgggctccggcgatcctcccgccttggcctcctgagccgccacgcccagttctcacactgtactgtttccccgtggcttaacgctctctcgtgccaggccttggacttggagcctcgcagagtggggaggtctctgcctcagggctcacccagccgtagtttctcctctctttcatgggatgcttcatcgactcgcctgtctggatctcatgttttagggactatctggatttatcccagtctctgtttcagattggggtctctggtgtgggggctctggcattgccgaggggcctcaggagccacttccagccatacagtgtctcggtccatcccaccaggctcagggcacggctcccatgtcctcaaactgcgtctgggaccctgtctaccttcagtttctggggggcgtctccagattggggcttggcctcctcaggctcagggtcttggccatggctccctcccaggtctacttcccatacctgcttatcagcaagaagcgctacgcgggcctgctcttctcctcccggcccgacgcccacgaccgcatggactgcaagggcctggaggccgtgcgcagggacaactgccccctcgtggccaacctggtcactgcctcactgcgccgcctgctcatcgaccggtgtgtggggcctcctccctcagactcagggggctgggccccaaacccctcctccctcagacccaggagtctaggccccagcccctcctccctcagacccacgggtccaggcccccagccccctcctcctcagatcccggggtcagggcccccagccccttcctctcttagatacaagagtccagacccccagcccctcctcctctgggaacacaggtgtcaggcccagctcttcctcggtggtgaagcagtggaaagagtcggcttgggcagctgtgggttcaggccctgcctctgccactctgcagcctatggtaggaagggcccctctctgccctgagcctcagccctaagagctcatcctggtctccagccctgagacccgtggaggcaccagcctggccctcagtgccttttggtgacgctgtgcggcccgctctcctacagagaccctgagggcgcggtggctcacgcacaggacgtcatctcggacctgctgtgcaaccgcatcgatatctcccagctggtcatcaccaaggagctgacccgcgcggcctccgactatgccggcaagcaggcccacgtggagctggccgagaggtcctgcgcggggcgggtggcctggccagaaataaccccctccttcctgccagctgggcccacttcctacaccctcgcccccacccccgccacccacctgccctcacccacccgccaccccatctccacgcaggatgaggaagcgggaccccgggagtgcgcccagcctgggcgaccgcgtcccctacgtgatcatcagtgccgccaagggtgtggccgcctacatgaagtcggaggtcaggcccacctggctgcctgctcccgcccagccccctcgctctcacttctgctttccgagatgggcgggcctgcgggaagggtggggcctcccgtgccctgtggggccctgagaaccgccccccatggcagcctgggtgtggcctcggccccctctggaggtcccccctctattctgacccctcccttgcttccctatggaaggggccccagtccctcccctgtgcatacagctccccagccgggggttcccttggattcataatcctccagctctacccccacccccagtgacccacatcttagccccatgacctctgacctcctgaccccttcctcatccttgcttccccttgtgaactctgacccttccgtggtgacctgagagccctacagactctgtggcccagagactccgtgacctccgaccccatcccagacccaggccccccccatgtcacagcccgcaggcaggcctaggccctaagccccaggccccatgaccaccccgtgtccaccccggtgccctttccctggctgcccgggtgtgactgccatgtggccgcaggacccgctgttcgtgctggagcacagcctgcccattgacacgcagtactacctggagcagcagctggccaagcccctcctgcgcatcttcgagcccatcctgggcgagggccgtgccgaggctgtgctactgcgtacgggggcaccaggggactgggggcaccctgggggggcagaggagatcaccggcccaccacctgcctcctctcctgcagggggggaccacacgcgctgcaagacggtgctcacgggcaaggtgggcggcctcctggccttcgccaaacgccgcaactgctgcattggctgccgcacagtgctcagccaccagggtgagcggccctggccactgggcccccactggccctcaacctgctctgccgtcaccccagatcctagacacccaccccatcggctggcactgccacccagtgggcccagggcccctgggtgggtggcccctgtctccaccccccacagagggtcctcggcccccaccccgggagttccccaggggagttttcccagcacacttgctccgttgttctccagcctctggggactttcagaagctgggattggcagtgggcagggatggggtggcccagttcctggctgggccccagcacttgggctgacccgcctccccacaggagccgtgtgtgagttctgccagccccgggagtctgagctgtatcagaaggaggtgagagggccgggaggtgaggaggggccaggtggggaggcgggggcgccctgctcagccgctgccgtccccaggtatcccatctgaatgccctggaggagcgcttctcgcgcctctggacgcagtgccagcgctgccagggcagcctgcacgaggacgtcatctgcaccaggtgtgtgccatgtcccgaccctgggctgccccgccccttcccagctcccaggcctgtgggttgtggacccaacctctgactccaaggcctctcctgagcatcctccccgcccatccccttccagctgtgagctgtcctgagcctcagtgtccttgtctgaaaaatgggcccatcccagccccccagagggggtgggtgcttagggaggcagcgcccggcacccagtgttgcccgggaaacggctgtcctcccgacacacccagccagcctggccccctccccagggcggggccgggctttccccagggaacgggtaggcggggtgggttcccacgccaggtgacaggtgatatacggccagccatggccctgcacctcgccaggcacccgctgttatcggctccccccccccaccccccccgtgcctgctgagcaaacagcccgctgcgggagggggcgggtgggctgggcagcaggcggggaccaaagtcctgggaacagcccccacccctctcccaggctgggcactgggccttggctggtcctgaccctgcccctgcccccacccgcagccgggactgccccatcttctacatgcgcaagaaggtgcggaaggacctggaagaccaggagcagctcctgcggcgcttcggaccccctggacctgaggcctggtgaccttgcaagcatcccatggggcgggggcgggaccagggagaattaataaagttctggacttttgctatatggtgctttgtggtctctgggggacactgtctggtttcataagccctggccttggctgggaccctcctgaggcccgcaccgcccctcatcctcagcaaaagcccccggactcccacctgtgctgcctggttcatgtgggccaagcctgcctcagtttcctctctggccctgaaggaacccttataccagcgcttctctgccctgcttagggcccccaggtgtctggccccggcccagccctccctggtgatgaccctggggaccctggtggctgccccgccctccaggtgctgacctgtttcctccaggccctggggcagccccaggcgcaccggggcttccactcctcagcccggccaaggggacccccccatcccccgccggaccacacacccacgatgtttccacgtcggggtcctggcaatgggctttgggtctgggtttccccccagcgactcccatctctatccccgcagcctctaactgccgtcagatgccctcggccctcccgtcacctcacacatcccccggggagagtcttgtgcttgcccctcggcccccagcccgcccctgctggaattcggctcctgggtccagatcctccgtttcctgattctcctcttcagtgaaccccagcccttcctcgatgttttcagggttcccccaaatccagctcctgtcccatctccagccctcaaggtcagccccccaaacccagccccacggggatccccaaatccagacagcccctggcccgccatccctgccatgtgacaaaggggttgtgcaatccagccccctcccctgaccccctccctgaggggatttttgaggagggccgagcttgtggccagcgggcaccctcctccccccggcaggggctgggccaagatataaatagggttggcggctgcagcgggcggcaaacagcccgcccggcaccaccatgctcgccctggaggctgcacagtaagtgagggcccccaaacctgcacccggggtccccacctgcactgcccctctgtggggcctcacccatgggcagtggtttctctgctcctcacggccggtgggtgggagtggaggggaggggtccaccctgtctcttgccccttctggttctgttccctcttcacttcggactctccatccccccagttcctatctttcctggtccccaaagatctcatttccccagaacacttgctagcgtgccctcctgcgggcgtcctccgtggctctcactctgtccatcctcctgtctccccgagttcccgtatctgttcgctctgtatctggcatctcccagctctcaacattctgcctgttgctctctgtctctctgcctgtctctgtgtctctgtctccagttctcgctctccctgccttttggtctccttctgcctcaccctcactctcagtgcctccatctggggctccaggaatcctccccgcctctgtgcgtgaatgtccctttgcacacctttctctgtgtcccacctctccttgagcctcctcatctgagtcttctccgggcttccccctctctacccagacatctctccatccttctcctctggtccaagctggactcaactgactcgccaccaaggccgcacttgacccaggccccctctccatccccacacctcctttccgggactttctctccctcactttccctgcccctccccaccagggtgtctatgcaaattctggggaggagggggacatttgcctcccccccaccccccacttcctgtcccagcagggggtagtgggggagtccggtgaatgtggtggggctggtccctcacacagggctgcggtggtcacagctgctgccgcctccccatcagcccccaaccactttgagattcaggtggctggaggcagcctcagcatgcccctgtgtctctccccctccaggctcgacgggccacacttcagctgtctggtgagttggggcccctgggggccagggaggggtggcccacagtgacctccctcagagaagtcatttgcttcctgcctcagtttcccctcccacctcttcctgtcactttgtttctgagctcccccttggtatctcctgctaccccgcatccgtatttttgatgtctctctccccctctcaggcttgaatccacttccttgtggctttgtatctctctctgcccatcccatattcagacaatgtattttcatgttcctttccttctttttgttcgtatttttaaaaattgtgttctctaacagttcagatacggaatactatacccaacacccttgaacccacaatccagtctgagtaatcaaatcttactgatgtggttgaaagaaagcccctgtttatgcccctccacattcacaccccagccatgttttttttgtttgtttttgtttgtttgttttttaattgaagtgtaactaacaagtcagtaaagtgacaaatcttgtgtttttgcattatctatacaccgtgtagccacaagccagatcaagataccgaacatttcaatctctgaaatattccttcctgtcccttctcagtcaatacctttctctgatattttccgccaccaatttgtaatttgttttgcctgctcttttttttgttttgctttttgagaaggagtctcgctctgtcacccaggctggagtgcagtggcagcgtcttggctcactgcaagctccacctcccgggttcaagcaattctcctgcctcagcctcccaagtagctgggattacaggcatgtgccaccatgcccagctaatttttgtatttttagtagaggcagggtttcaccatgttatccgggctggtttcaaactcctgagctcaagtgatcctcccacctcagcctcccaaattgctgggattacaggcgtgagccaccgcacccagctgcctgcttttgaactttatgtaaagtgagtcatacagcatgtcccttttggggtctggcttccctcactcaacatgaagtgtgtgtcagtgtttgtcctttttccttgctgtatagtactctatctatgatcagcccacaccacagtctgtttatcccttcttctgttgatgacacctgggctgtttccagttggagactcataataaagctgctgggatgattctggaacaaggctattttgtgcacatccattttcagttctcttgattaaatgccaaggagtgagactgccaggtcctaggcatggtgtggatctagctttagtttttcctagactcgagttcttgaagcaacaacacatgattcatggggcgaatcaacatatggagatttatttatttatttatttattgagacagagttttgctctgtcgccgggctggagtacagtggtgcgatctcggctcactgcaacctcagcctcctgggttcaagcgattctcctgcctcagcctcccaagtagctgggactacaggtgcgcaccaccatgcctggctaatttttgtatttttagtagagacggggtttcaccatgttggccaggctggtatcgatctcctgacctcatgatctgcctgccttggccttccaaagtgctgggattacaggcatgagccaccatgcccggcctatttatttttcgagacagagtctcactctgtcacccaggctggagtgcagtggcgcgatctcagctcactgcaacctccacctcccaggttcaagcgattctcctgcctcggcctccagagtagctgggattacagacatctgccaccaggcccagctaatttttgtattttcagtagagatggggtttccccatgttgtgcaggctggtctcgaactcctgacctcaggtgattcactggcctcagcctcccaaagtgctaggattacaggcgtgcgccaccacgcctagctaatttttgtatttttagtagagacgggatttcaccatgttggctagactggtcttgaactcctgacctcaggtgatctgcccgcctcggccccccaaagtgttgggatgacaggcgtgagccaccacgcctggcctggaggtgtatttaaaaagcattgacccctgcctctgttaagtgaaacacttccatttccccttgcccttcacctccggagcccccaggcaggcaaggctgggggagttcttccaccccttctccaggcgccctgattcgctgactgtgtgccagtgaggggccagggttcttgggagcccaccgtcttagcaggagctggctgctgtgtgcccctattgggttgtgtctctactctctgtatctctgtctctttgtccctgtctctgatgcctagtctctgtgtttctttgttgctctaatctctccagcatcccctcttctctcccatgtctgtgttggagtctccccaagggtccagggtgggggttgggagtccccaaggcctgggatgacccctcttccctcctgcaccccgtatcagtacccagatggcgtcttctatgacctggacagctgcaagcattccagctaccctgattcagagggggctcctggtgagtgaccccagccctgtgcccttcctgccttggggcccatttcacagataggggagctgaggcccaggggaggtcatttcctagcacaacaggataaaggtggcccgggcctatagccctcctcccctttcctctcctacccatccgctcctccatgcaaatcctggggtcagagatttgcacagcctacaatggcctctctgtgctgggggcttcgactgcgaggaggcctccgtgagacatcccagcttctgactcagtgcccttcccccagactccctgtgggactggactgtggccccacctgtcccagccaccccctatgaagccttcgacccggcagcagccgcttttagccacccccaggctgcccagctctgctacgaaccccccacctacagccctgcagggaacctcgaactggcccccagcctggaggccccggggcctggcctccctgcataccccacggagaacttcgctagccaggtgagtggtaaggggacagttaaaatcaagcccaaaccaggtgtggtggtgcacgcctgtaatcccagctgcttgagaggctgaggtgggaggaggattgcttgagcccagaaggtcgaggcaatccactgcactccagtctgggcaacagagcaagaccctgtctcaaaaaaaaaaaaaaaaaagaaaaagaaaagaaaactcaagctcagtcatttggttgaggtttgctgggtgccgggcactgcattgagactgcacatagtaagccctgcagcggcctcccaggttacgttccgttgttgcccctctgaacaagtgagtcaagagaggtagtgacaggaagccagggacagggcagactcgcattacctgtgttgggccggctttgaggaggtacctcaggtgtcccctggccacagcgtggtgatctgaacaaaggccaaaatctaggctgtcaacaaagagggagaccagagccaggagggccaccgccttggcctgagaggaggaagtggagggagacaaggggtccctggacatgcaggtgaccctgaccttccgcagaccctggttcccccggcatatgccccgtaccccagccctgtgctatcagaggaggaagacttaccgttggacagccctgccctggaggtctcggacagcgagtcggatgaggccctcgtggctggccccgaggggaagggatccgaggcaggtatgcgggagtggctggggtgggggagatgccagctggagatggtgggggggctgagagcaccatggcttcctgggcctctacatatactccagcactctgggcagctcccagatccgcaccacctgctggctgtgtgaccttgggtaagtgcctctacctctctgtgcccaggtttcctgtctgtgcgatggggatggaggtgatagtgtctaccctcctgaggtcgttggggggactaaatgggatagtaagtgtaaatgggacagcagtgccaggcacagagtgagcacttcaataagtcaacctcttcaccatcattcccgacaccacagcaacagaaatgataatgctatcaacccccaacggttcaacccttgccccctgcccgtgtgcccaacatcctttatgctcaaccccaagaaagctgagatcgttccttcctttctgtgtctgggcctcggtttctcgtctgtaaagtgggcatcactgtcatcctccccatctcacggggttatgatggagattcaatgagctcataactgtaaagtgccttgtgaagcacctggcactacatgctccacggtgcattgtaaaaatcaacacacaggctgggtgtggtggctcacgcctgtaatcccagcactttgggaggctgaggcggtcagatcaactgaggtcaggagttcgagaccagcctggccaacatggcaaaaccccgtctctactaaaaacacaaaaattaggctgggcatggtggctcatgcctttaatcccagcactttgagaggctgaggaggatggatcacgaggtcaagagatcgagaccatcctggccaacatggtgaaacctcacatttactaaaaatacaaaaattagctaggcgtggtggtgtgcacctgtagtcccagctactcgggaggctgaggcagaagaatcgcttgaacccaggaggcagaggttgcagtaagccgagatcttgccactgcagtccagcctggcgacagagtaagactctgtcttaaaaaaaaagaaaaaagaaagaaaaaaaaattaatggggcatggtggtacatgcctgtaatcccagctactcaggaggctgaggcaggagagttgctggaacccaggaggcaaaggttgcagtgagctgagattgcaccactggactccagcctgggtgacagagcaagactccgtctcaaaaacaaacaaacaaaaccacagcctcatttaaaaaattttaattaattaattaatttattttttgagacagagtctcgctctgttacccaggctggagtgcagtggcacgatctcggcccactgcaacctccaccttctgggttcaagcaatcctcctgcctcagcctccgcagtagctgggatcacaggcacccacaccatacccagctattttttgtatttttagtagagatggggtttcaccatctggccaggctggtctcaaactcctgacctcaggtgatccgcccgtctcggcctcacaaagtgctgggattacaggcgtgagccactgtgcccagccacacagcctcatttgtggctgagagacttcagctcagagaggttaattaagtcacctattttaacttaggacatttaagatggagaggatctctccaatgactaggaaagacacaagatggaaataaagattttatttatttttattcatttatttgagacggtctccatctgtcacccaggctgaagcgcagtggcgcaatctcggctcactactgcctcaaactcctgggctcaatcgatcctcctgcctcagcctcctgagtagctaggaccacaggcgtacaccaccacacctgactaatttttaaaatttttgtagaggtgaggtctcgctatgttgcccaggctgaactcccaactcctgagcctatgtgctcctcccacctcagcctcccaaagtgctgaagttacaggcatgagccaccacacccagccagaaataaattattttatggcttataggtcctggggcatacatggcacgcctggaggccacacacaccaggtcagggagcgcaggcagggagggagagagagagggaccagtggactgacgcctttattgggtccaaggcgtcggccaaacaggtttcctgagggggttttaattggtgggttcaggccaggcacagtggctcatgcctataatcccagcactttgggaggctgaggctggtagatcacctaacgtcaggagttcaagaccagcctagccaacatggtgaaaccccgtctctactaaaaatacaaaaattagctgggcctggtggtgcacgcctgtaatcccagctacttgggaggctgaggcaggagaatcgcttgaatccaggaggcagagtttgcagtgagctgagatcatgccactgcactccagcctgggcaacagagcaagactccagctcaaaataaataaataaataaatacttggtgggttgaaagcaagcaggatcaagttccaggaggtcacgctgtgcctgagagggggtcactgaggcatctgcacagtccatgcagggccgtcaagtaggctgtccatggctctcccacagggaggtggtcaccaggagtcagttgcataagagagatatctgggtcagccacactgaggaactcggggagggagatgtagaactgccaaggaggacagccctgcttccagcatgagaatgtccaacttttatttagttttattttattttattttgagagggagtttcgctcttgttgcccaggctgagtgcaatgatatgatttcagctcactgcaacctctgcctcctgggctaaagtgattctcctgcctcagcctcccaagtagctgggattacaggcatgagccaagcacacccagctaatttttgtatttttagtagaaaccgggtttcatcatgttggccaggcttgtctcgaactcctgacctcaagtgatctgcccaccttggcctcccaaagtgctgggatcacaggcatggcccaccgcgcccagcctccaacttatactttcgatgaatgccgaggcagcctaaaattataagaattcaatccgggtgcagtggctcacacctgtaatcccagcattttgggaggccgaggtgggaggatcacctgaggccaggagttcaagaccagcctgggcaacatagtaagacaccatctctacaaaaaataaaacaattagctaggcatgatggtgcatacttgtagtcccagctactggggaggctggggcaggaggattgcttaggcccaggaggtcgaggctgcagtgagctgtgattgctcctctgcactccatcctgggtgacagaacgagaccctgccttgaaaaaaaagaaattaagatgtcactacgtcaccaccccaaggtcacactgctgtaaaatggcagagatgggattcttgtagccagtgccctgctttgaaactcccagttattggccgggcgcagtggctcatgcctgtaatcccagcactttgggaggtcgaggtgggcggatcacctgaggccaggagttcgagaccagcctggccaacatggcgaaaccccgtctctactaaaaatataaaaataagccgggcatggtggcagacgtctgtagtcccaggtactcgggaggctgaggcagcagaattgctcgaacccaggaggcagaggctgcagtaagccgagattgcgccattgcactccagcctgggccgcagagcaagaccccgtctcaaaaacaaactaaaccctaggagcccaggagtcaggtgccctggcctctcccgggaccctgtcccgctttgggctgagaggctgggagaccaggagctggagagatagccaggccaatgcaactgcctccagatctgttcgcctctccgttataatcctttaagcggcgctgtcaacccatttcacagattctttcatccactagctcaacaaatatggaatattacgtgctggccgcagggcggaaggcaggacagatgtaaatctcgaaaattaaagcacagaacgcggagggggcctggggctgacagcttcgggcagggggagtggcttgcccccccccccccccgtggtgaggggcgcagagccaggtgtatgtaacagccacttccctcaccccacttttcagatccaggagatggaggccggggtggaagtctcggaggagggtggatggggaaggcggggccttagggacccctcacctaacgcgtgcccccgaccccaccgcagggactcgcaagaagctgcgcctgtaccagttcctgctggggctactgacgcgcggggacatgcgtgagtgcgtgtggtgggtggagccaggcgccggcgtcttccagttctcctccaagcacaaggaactcctggcgcgccgctggggccagcagaaggggaaccgcaagcgcatgacctaccagaagctggcgcgcgccctccgaaactacgccaagaccggcgagatccgcaaggtcaagcgcaagctcacctaccagttcgacagcgcgctgctgcctgcagtccgccgggcctgagcacacccgaggctcccacctgcggagccgctgggggacctcacgtcccagccaggatccccctggaagaaaaagggcgtccccacactctaggtgataggacttacgcatccccaccttttggggtaaggggagtgctgccctgccataatccccaagcccagcccgggcctgtctgggattccccacttgtgcctggggtcctctgggatttctttgtcatgtacagactccctgggatcctcatgttttgggtgacaggacctatggaccactatactcggggaggcagggtagcagttcttccagaatcccaagagcttctctgggattttcttgtgatatctgattccccagtgaggcctgggacgtttttaagatcgctgtgtgtctgtaaaccctgaatctcatctggggtgggggccctgctggcaaccctgagccctgtccaaggttccctcttgtcagatctgagatttcctagttatgtctggggccctctgggagctgttatcatctcagatctcttcgcccatctatggctgtgttgtcacatctgtcccctcatttttgagatcccccaattctctggaactattctgctgcccctttttatgtgtctggagttccccaatcacatctagggctcctccaagatccttttgtcatgtctgaaatcactcttgagaggtctggggtggaggatggggagtcagtgaaatgtgtcatgtctgggccctgtcagggacacccttgttatatctgggatcctccaatcacatctgagacctcctaggctctccatctgatatgccctttcagggaccccacaaagactgagttctcatggggatcctacccttcctagtgccactccctatggccatgctgaagaccactctggccacgcgactgattttgggtgatcatggcagctccccacccatgtcatttctaaccagaagtctcaaggtcgtcacccccctgccccccaaccgaggccccggtcgctggtggtggtctctttagtgcactgtagcacttggtggtggaggtgtgagggatccacattaacagcaggccatcagctgggcaatggctcacacctgtaatcccagcactttgggaggcgaggcagggggaatggcttgaacccaggcattcaagaccagcctgggcaacataatgagacctcgtctctacaaaacataacaaaaacaattagccgagcgtgggggtgaacacctgtggtcccagctgctcaggaggctgaggtgggaggatctcttgagcccaggaagtaggaggctgtagtgagctgtaatcgtgccactgcactccagcctgggcgacagagtgagacaccgtcttaaaaacaaaaacaaggccgggcacggtggctcatgcctgttgtcccagcactttgggaggccgaggcaggcggatcacgaggtcgagagatcgagaccatcctggccaacatggtgaaaccctgtctctactaaaaatacagaaattagctgggcgtggtggcacgtgcctgtagtcccagctactcgggaggctgaggcaagagaatcgcttgaacgtgggaggcagaggttgcagtgagcctagattgtgccactgcactccagcctgggggacagagcgagactccgtctgaaaataaaaacaacaaaaacagcagaccattcaaaatagggagactttgcataatccagatttctgccttcacttaaaactttggacggtctggagagagtcggccagttttcggtggggggtggggagctggaacaggacagtagcctttcctaatgaggcatttgttctccaatctgccccagtcgctgccatccctggctatctcaccctagcagcttctcaagcctgttggctttagaccactgtataaacccagctggaactgaagcctgggtggactatggagccctggttgggacccccagggagtcaaaggctgcgggccaagaggccagaggtccttgagcctgggtgggcaggtggatctagggtgcatgacttgctgcttcccaaccttagtttgtcccttctgtgaaaaagggagagaaggaggaggaagatctcaaaaagactttccagcccagtgcggtggctcacgcctgtaatcccagcactttgggaggccgatgcaggtggatcacctgaggtaggagttcaagaccagcctgaccaacatagtgaagccccttctctactaaaaatacaaaattagctgggcgtggtggcatgtgcctgtactcccagctacttgggaggctgaggcaggagaatcgcttgaacctgggaggcggaggttgtagtgagctgagatcacaccactgcacaccagcctgggcgacaagagcgaaactccgtctcaaaaaaaaaaaactgttgcagccccgttgagcctttgacaccgcctgaaatccaccccactcccaggaggaggaggaggaaggaatgccaatgacctagagacacgagaagtccatgtggaggcacacagcagctgatggcagagcccaggctgggacctgcccttaagagaatgagtgggaagggggagggaggaagggcaggtaaaacgtcctccccagggccccctgcaacggggaaggtactttttacaaaagctatcattgtcaccctaaatgtggaataaaataagatgcatcgacgtagacaaacctcctgggaccttttgtcagggactgcaatcctgcccctccactgaggccgctggctctcagagacaccgtgacatcacgggtgatgatgagaggagttcaaagagagaattatatgctggcgcggtggctctgtaatcccaacactttggggggccaaggcaggaggatcgcttgagtacaggagtttgaaaccagcctgggcaagatagtgagatccccttcccacccgtctacaaaaaaaataaaaaattagcggggtgtggtggcgtatgcctgtaattccagctactccgaactactgaggtgggagggtcacttgagcacaggaagttgaggctgcagtgagccgtgatcgtgcccctgcactccagacacggcgagaccctgtctcaaaaacaaacaaacaaatcacaaagacaccatacagcaaaacctatctgaaccttaatgccgagaaataagaggcttgacgcgcaggcacagagggttccgtttatgtcttcctctattcctgccaactgaagttctccacctcctccccgcttccccttccgtctgggtgtctgtccccttccctctgaattgagccctcgggctggcagcgagggacgcgaggcttcaggtggccgcggcactgcaggcctgggcccctccccaacttagcggggctcgcgggagcgcagtggcagtctgcctggcaacccgtgacatcacatggaactgacgccggattggctggacgctccccggaggcggagaaatttccggctcgtagggggttttggaaaaggaggagggggaagatgaacaggaaaaaaaagcggagggacttgttttcctcacaccgggtccctcacgctgcgttactagccaggcagtcccccagccttaaccctaagtccccaacaccctttccctccttcctccccacaacacctggtgtccccaagccccgcccctccccaggccccgccccctcggctccccgccgcgtccagagccaccccattcagaaagtcacaggtccccctgccgggaagggcgccaacgtccgggcagccctccagggccttcccagcctcccacccgcccccaccggggacgcccaccccctacccgcgtccggtgcctgccgtgcccgctccgggaagagtcgcggggagcggtcccaggaggggcggcggccagtccggggtcccagatggccggggccccagctctttgggtttgcccacgcccggggcgcgaaactccggagtcccagagccgcggcgccctccccggaggcgcagggacctcctccccccgccgccgtcctgcctacgctaggaaaccggaccctccctcccggctccggtttcccgaaaactcctgacttgcagatgctaagaatggcttcctagaccctgtccctcccctccctgcttcatgccagagctctggcccgcagcccttacccccttgagaccctcagtctcttcctcttccttctcccgggacccaggcgtccaggcgctcgtcctttctagggaacccaagaatctgggaccccagttgcttctgctcccagactcaggggtccaagcacccagtcccctcctccctgagattctggagtccgagccccagccccctcctccctcagacccaggtgtccgagccccagcccctcctccctggggacctggctctcagccatctccctaggtccagctgttatttctcgccctttagaacatgcgggcggaatgtggggcggccctgtggtctgatgtctcccggagccttctgggagtctcaggactcattaaaaggctccccttaggggcccacctgtcctccctagggcctagcgggacgcggctgcggtcagaggagcaggaggaggtcccccgacatgcctgaggcaaaaccaggtggcgccaggaccccctccctgtgtggggatggggctcttcttttctggatggggatttgggacccctctgtttgtagggttgggagaaggaggaaccttcgctgtgtgaggaggaggctccctttgctgtgcgggatgggggttcccgcatcagtttagggtgagggtctcgactctgcatggggaagagggtcccttccctttgtgacaggagtttccttccttgtatgagatggggtgggtctcatatctgtgtggggtgagggatccccttcactcagcagggagggtgtttctttttctataagtgattgggggggcatctctggtggagatgggattctctggttgtaaattgggttccttttgcttgatggggatgggggtctgtgtgtgtagactgggtttttttgtttgtttttgttttttggtttttggttttttttttgagatggagtctcgctctgcccccggggctggactgcattggtgcgatctcggctcactacaacatccgcctcctgagttcaaacaattctcctgcctggggtagctgggattacaggcctgcgccaccatgcctggctatttttgtatttttaatagagacgggtttcgccatgttgaccaggctggtctcaaacccccaacctcaggtgatccacccgcctcagcctcccaaagtgctgggatgacaggcatgagccgccgagcccggccagactgggaggtctttgcatgtgactggattctccacatccggggatggcatcctctgggcagggtctgggccacttctctgagtgaagactcagagggagccaggtgcaggggctcacgcctgtcatcccagcactctgggataccgaggcaggaggattgcttgaggccaggagttcaagaccagcctgggcaacatggcgagaccttgtctctacaaaaaattaaaaatcagccaggtgtggtggtgcatgcctgtagtcccagatacttaggaggcagttgaggctgcagtgagctgtgatcacgtcactgcactccagcctgggtgacagagtgagaccccgtctctaaaaaacaagcaacagcaacaacaaaaatggcccagtgcggtggctcatacctgtagtcccagcaccttgggaggccaaggtgggtggatcacctgagcccagcagttcaaggccagcctggccaacatggcaaaaccccgtcactacaaaaaatactaaattagctgggcttgtgggggtgtgcctgtagtcccagctactcaggagtctgaggtgagaggatcacttgagcccaggagacggaggttgcagtgagcccaaatcttgccactgcactccagcctgggagacggagcgagaccctgctgggaaaaaacagaaacaaaaacaaaaaatagattccaagggaccttctctgtaggatatggggtgattgtgggtataaagattagtggttcccatctgcatggagtcacaggggaagtctctgtattaaggatgggggagcctcatttctgtgggcactgaggcttccccgtgtaggaattagcggggcttcttcatgcagggaatggggtcctttttgcggggtttggggaccttctttgaatggggaacactttctgtggagatgaggctttctctctatgaggaactcaccgcaggaatcatgcaccgctgggcggaccccctcctgggatgtctggtccgctggcatcaggccaagcaggctgtggggtgggtccagcccctactgtagctgcagacccagccggcaaggaacagcaggcagggcaggggaaggatgctgcggtcagcaccaggtgtccagtttccagcccagagggagagctaattataccctcggacccaaaaggtcagggcgtggtggcctgggcggatggggcagggcctgctgggggtaagggaaacccgatcccacagactctcagatctgagataaatttatacctagggtgggggcctggactcttgggtctgagggaggaggggctgggggcctggactcctgggtctgagggaggaggggctgggggcctggactcctgggtctgagggaggaggggctggggggtctggactcctgcgtctgagggaggggcatgggtgtgcagaccgcatgctcaactatgactgtcccctaccttacagcggccaaaaaggcccccaaaggcaaagatgcccccaaaggagcccccaaggaggctccccctaaggaggctcctgcagaggcccccaaaggtgaggaggtgctccctcgggctcaaccgacctggcttctcatctccatcctcctcgctacgcctctccaggcctttccccagcctctatccttgaatctgtccccgcacagccccagggctgacccacgcctcccgtgctcccagccctcccggggctccctggcacccgcaggcagagcccagcccctcggctggcatcggctccggtcagctggctgattgatcaccaggtccggccccggtctctctaaacctctcccgccccaaaggcacattcagtgccctccagtccacagatgaggaaaccgaggcccaaaggggtgagggagcctggccaaggtcacacagccacgagggtgacaggtggcctttcccaggtcaggaaaagccatttaacccccatgatgtttggtttctgagtagaggggccctcactgtctctaagtcctttccccaaagcggcccactgtcccctccccagcctatctcagacctcctcatcctaatcctgtcccctgaacagaagccccacccgaggaccagtccccgactgcagaggagcccaccggcgttttcctgaagaagccggactccgtctcagtggagactggtgaggggaacccgggggaggaggggctgcggcccggactcctgggtctgagggaggaggggccagggtctcgttctgtctccctctggagagccttatgttccttcctgggcctcctcccactctaccctgtcactcaccccatgtagggaaggacgcagtggtcgtggccaaggtgaacgggaaggagctcccagacaaaccgaccatcaagtggttcaaggggaagtggctggagctgggcagcaagagtggcgcccgcttctccttcaaggagtcccacaactccgccagcaatgtgaggaccccgtgggccagagggctggtggaggggagtggagcttgtgcaggacatgctcctcagaagccctgttgcctgaggcatcaatgtgggcctggagccgggatggagagtgggccctctgaggatggaggttgtgcggggctgctggggagaggttgtgtgaagcagagggaggatgcctggggttgggtggggatgcattagggcttggtcatgtacattcctggcaaggcctgagggggccagggacctgggccccagaagtcctgatgggtcagatatgaggagacagagctggccaccaggtgctgagacccctctcggtctccattggcccccctgtggggtgggggtgaggacgtggagatagagctatgagtggactctgaggaatatggggtggctctagagggtggtcccgtgcacccacacccccggccctggacccaggtgtacaccgtggagctgcacattgggaaggtggtactgggggaccgtgggtattaccgcctcgaggtcaaagccaaggacacctgtgacagctgtggcttcaacatcgatgtggagggtatgctggtgggggatgcgggagcaaagggttctatgtctgggtggggtggacagatgtaccagccaggtgttgggagagtgcacaggcatgggcatgaggtgggcacaggtttttggaggagggagtgcagattctggggtcagagtattcaaactcaaggagacatagcatgggaggaggtctggatttcgggggtgaaagtgtacagggtcttgggatgcacatgcaaaggcttaggaggtgagttatgcacattccacgtttaagaaagtaggcaaaacggcttgggaagtgagggtgtccaggtttagagaagaaggatgtaggggtttagagtgagggtgtacaggattaacaggaggttacacggatttgagggcacatatatgggcccctgagggtgtatgggctctgggggtctgcagcccagaatgtgtgagggcttaaatgtggggtgcacaggaaatgagattgtccaggcctggggagaaagacatggtggcccaggtgtggggggtataggctgctgagagagggtggagcttggcagctggggaaatgagtatgagctggtctagaactagaggatgcccaggcctgagcaaggttgtgctggtccaagagatggagaaaagggggcctggaagaggttgtgcaggcctggagaggggctctcagtctaagatcagccctggcctctaactcaccttcccttctctcatcacctctccccagcaccccgtcaggatgcctctgggcagagtctagaaagcttcaagcgtacgtaagtgaccccaggcccttaccagggtcccaaggaccatgggaggctctcccttggaaggggaaaaagggaggattggggaaggcaaggggtgaatctgaagggtcaagactcacatgccctctcaatggccacaggagtgaaaagaagtcggatactgcaggtgagctggatttcagtggcctgttgaagaagaggtgagccccggacttggcacagagaggggagatgggactcaaggggaggaggtggtgggtgaagctccatggcccactgattcctcctggacccactgcttatccctctaccacctccatctgttcactccctgcccacccagcatctaacacaccaacccatcaggctgcctgttcatccacccacctacccatttacccagacccctacccacaaccccacccagccaaacatctgccatgagttcacccaccttctcaccccttaacccaccattctcacacccactctgctgttcactcaggctctagttcacctatgcctccacctactcaccctcccatccatccatccctccatccctccactttccacccactgatccattcactcacccatccatccaaccagtggcctatttatgtatctactaatacatctatccacctacctgcccagttgccaatctatctacccacatatccatccgttaaccaccattttcccacctgtttacctgcccatctgccattacagtcagcctagctacatgggtaggtggatggataacgggtgaatgggatgttggatttggttgggagatgcaggtgcagatagacaggtgggaaggtgggtggatggtacggatgaatgcatggtggagaggtgggaggatgggtgcctcagtaggtggggaagcggatggatggatggggtgggtggacgatgaatggatgggttcatgaataggtggctgagttcaccagtgaagaggtgggcagttgacacgcccatccacacagatagccctctgttagattgaactatgtaaaattgatgttctgcaggtaaaaaatgattgaagtctgggtgcagtggttcacgcctataatcccagcacttttggagaccagtgtgggaagatcacatgagcccaggagtgtaagaccagcctgggccacatagggagaccctgactctacaaaaaaaagaaaaattagcagggcatggtggcatgtgtctgtggtcctaactacttaggaggctgagggaggaggatcgtttgagcccaggagatcaaggctgcagtgagccatgatcgcgccactgcactccagtctgggcaacagagtgagactgtttcaaaaacaacaaccacaaaaaattaaatatcggcaatctcatatgcattatctgctggcccacttatccatcttcacttgcccatcaatccccataactatatccctgacaattccatttactgatcaattctgtctgcagccagccagccacttccttggccacttctcatcaacatattcacccaactgcgcagtcatttctcaccaacccatcaatccatccactcacccacctgtcttcccccaacccatcaatccatccacccacccacctgtcttcccccaacccatcaatccatccacccacccacctgtcttcccccaacccatcaatccatccacccacccacctgtcttcccccaacccatcaatccatccactcacccgtcttcccccaacccatcaatccatccacccacccacctgtcttcccccaactcatctgcctctcttcccacccacccttccactgacccacccacctacttatcagcccacttactcaccattctgtacatcaattcaaatattcatgtccccacattcacctccacatctatcctctctttgttcctttcccttccttccttccctcccaagctccatccatgcattcactcactctctcacccatcaaccatcttctgaggcctcccgtctactaggtcctgggctgagatccatgcattcactcactctctcacccatcaaccatcttctgaggcctcccgtctactaggtcctgggctgagatccatgcattcactcactctctcacccatcaaccatcttctgaggcctcccgtctactaggtcctgggctgagatccagggagagagaacagtctgactgggtccctgatgtgagatcactcattgccttgggaaatgggtcttgtccaacagacatagatacagactgagactatttggtgtgattttagagagggtcccaccggggcctgtgagagcccagagcacgagcaactcactgtcttgtaggacacggaatgcctcagggagaagggaactttggtgctaggtcttgtaggatgaagaggagtctgggaggaagagaaggtagggagaggtcatgaaggtagggaaacattttgtgcaaaggctgggaagcaggagagagcctgaagtgttcagcaaaagtcaagcagcttggttcaggtgactttggggggagtgacggaagtagctggggtgtgatggccaggcggagggctggggcttcctcctgagggcagtggggagccacagaagagttctgaacatgaaagggagaaccactgatgtgggtgtcagaaataccccacaggataaaagaggacaaatagggtgcaatgtatgctgcttgggtgatgggtgtaccaaaatctcacaaatcactaccaaacagcttactcatgtaaccaaacaccacctgtttcccaataacctgtggaaataaaataaataaataaataaataaataaataaataaataaatgaaaagaaatactctgcggaccaggcatggtggctcacacctgtaatcccagcactttgggaggctgaggcgggtggatcacttaaggtcaggaattcgagaccagcctgtccaacatggcaaaaccctgtttctactaaaatacaaaaattagccaggggtggtggcgtgagcctgtagtcccagctactcgggaggctgaggcagaagaatcgcctgaacccaggaggtggaggttgtagtgagccgagatcacgccactgcactccagcctgggagacagagtgagaatctgtctcaaaaaaaaaaaaaaccaaaaaacccagtggggactgtgctgggaagaggtcagaagaccccaggaggaggctggggcaatggaccaggcgggaaacaataagacccctaaagggaaggtggcttgggtgagtcacagagccaatgagtgaagaaggcagagggacatcctcccttcctcactccctgatggcccctgtccgttcccccacccgccagggaggtggtggaggaggagaagaagaagaaaaagaaagatgacgatgacctaggcatccccccggagatttgggagctcctgaaaggggcaaagaagagcgagtacgagaaaatcgccttccagtatggcatcaccgacctccggggcatgctgaagcggctgaaaaaggctaaggtcgaggtcaagaagagtgcaggtcagccctggtctggggggagctgggccctgcacacaagggacccctagccttgtgggtgtctaatgattggaccctggacctatcttttcgaggtcccaatgaggtaggaggcaagacccaactctagcggtgggcctcggacaccagaccaaattgaggactagctaaaacagggacagggtggaagcagctttccataagacatgcccaccagtgtgccatgtcagtttaccatggccatggcaacagccaggagttactgcccctttccatggcaatgaccagaccacccaaaagttaccacccttttcctagcaatttctgtataacctgctccttaatctctaggtaattaaaagtgggtatcaatctgactgcagatctgccctgagccgttgctctctgtctctggggtagccctgttccgcaggagcagtcagagggctgtaacactgccacctcaataaagctgttttcaggctgggtgcagtggctcacgcctgtaatctcagcactttgggaggctgaggtgcgcagatcacctgacgtcaggagttcgagaccagcctggctaacatggtgaaaccccatctctactaaaaatacaaaagtcagccgggcatggtggtgtgcacctgtaatcccagcaacttgggaggctgaggcaggagaatcgcttaagccagggaggcagaggttgtggtgagctgagattacgctgtggcactccagcctggggaacagagtgagactctgtctcaaaaaaataaaataaaataaaaaataaaataaaataaaataaaataaaataaataaataaaaataaagctgttttcttctacctaacactggcttgcccttgacttctttcctgggtgaagccgataacccttgcaggctaagccccactttggggtcccctgccctgcatcaccaccagagaagttctcaaggatctctaagttcataggaggccccctgacttcctcactttgaccttggagagcccagggcctggggagggagatgtggtgcctctggggatgaccaggggaatgaggaccacacgcctccatcccctttgcatgcctcaatcttcagcattcacaaagaagctggatccagcctaccaagtggacagaggcaacaagatcaagttgatggtagagatcagcgacccagacctgaccctcaagtggttcaagaacggccaggagatcaaaccaagcagcaagtatgtgtggggtgggcagtccctgcaccggggagatccccgtccagagagaacgcccggagacaaggcctatcactcttaaccagaaagggcatattcacccctatatgaagagtacaggccgggcacagtggctcacgcctgtaatcctagcactttgggaggccgaggcgggtggatcacctaaggtcaggggttcgagaccagcctggctaacatggtgaaaccccatttctactaaaaatacaaaaaattagccgggtgtggtggcacatgtctgtagtgcctgtaatcccagctacttgggaggctgaggcaggaggatcgcttgaacccaggaggcaagaggttgcggttgcggtgagctgagatctcgccactgcactccagcctgggcgacagagtgagaccctgttaacaacaacaacaacaaacacatcacaagacaaccttttttaaattaattacctaattttgttttgagacagagtttcgctcttgttgcccaggctggagtgcaatggcatgatctcagttcactgcaacctctgcctcccaggttcaagagattctcctgcctcagcctcccaagtagctgggatgacaggagcgccccaacacatctaatttttggggtgtatttttggtagagatggggttttaccatgttgcccaggctggtcttgacctcttcaagcaatctgcctgcctcagactccaaaaatgctaggattacaggtgtgactggccctgccatggttatttaaataataggaattgctagcttggacaacatagcgagatcccatctctacaaaaaaattaaaaaattagaagataccaagaaaagagaaaaaaaaattagctgggtatggtggtgtgcacctgtgatcctagctactcaggggctgaggtgggaggatggcttggacccaggaagtctaggttgcagtgagctgtgatcgcaccactgcactctagcctgggtgacagagtgagaccctgtctcaaaagtaaataaaaataaataaataattgaaactgggccctcaatccctttccacacaatttggctctgagagagagagagagagacttgccttgagaacaggtaagcagagctaccccagggataggtggatgctccacgccctggtttgaggtgagacttttgaatcaggtacgtgtttgagaacgttggtaagaagcgaattcttaccatcaacaagtgcacgctggcggatgacgctgcctatgaagtagctgtcaaggatgagaagtgtttcaccgagctcttcgtcaaaggtgaggctggaattcagaactgagcctggagagggactggaactctggagggggtcctgaaacgactgacctcctgtccccctgccccacagaacctccagtcctaattgtcacacctcttgaggaccagcaggtgtttgtgggtgaccgggtggaaatggcagtggaggtgtcagaagagggtgcccaggtgatgtggtaagtgacccttgatccctgatctccatacaggtgcacatagtttctttgcctctgccttgatctttatgggacctcctgtgacttctcttggagatttctgacctttactcagtagtcatccccaggagatctcagcttttctctataaatccttaccttcacctaaaattgtttctagaatttctgacctctacctatcctatcctcttcagggtcgtcttcctgatctccgactgttccattaaatattcattcatctgaccaattatctattccttggtccatctatccaggtatccactcatccacccagtccatccatccatccatccatccatccatccatccatccatccatccatctgcttaaccatccatccactcatgcatccatccatccactcatccatccatccatccatccatccacttaaccatccatccatctacttaaccatctgtccatccattcatccatccatccatccatccatccatccatccatccatccatccatcccattgacccattcatccatctactcattcatatatccactcttccatttaggttgccatctagccatccatcgacctatcaatccagagatctatccatccactcactcactcacctgcatacttgcccaccatctacctatccattcatccatctatgtacctattcaccaacccaacaaatatttatcgagcacctgttgtgtggtgtactcttctacgtatcagagatataatggggagaaaaaaaatgtcaacatggccgggcgcggtggctcacgcctgtaatcctagcactttgggaggccgagacgggcggatcacgaggtcaggagatcgagaccatcttggctaacacggtgaaaccccgtttctactaaaaatacaaaaaattagccgggcgtgttggcgggcgcctgtagtcccagctacttgggaggctgaggcaggagaatggcatgaacctgggaggcggagcttgcagtgagccgagatcgcgccactgcactccaacctgggagacacagcgagactccgtctcaaaaaaaaaaaaaaaaaaaaaaaaatgtcaacatggtacctgccttcatggcatttataatctgctaatttggtgatagtggtggtggtggtgtgtgtgtatgtgtgtttgtgtaggagaaagagataggcattagtcaagtcatcacatacatacatataaaagttccattttgagactggcttgaaaggagcagtaatggatgttgtaatagcttcctaggaggaagggactcaggaggtcagggaagtcttcctggaggagatgacaattgagctgagatctgaatgacatggaggtataagtgaagagagaaggggagagtgccctggacagggaaaaccactgacagaggccacaacgtttgatgtttctctgagaccccagggcttcctctgtgcggacctctccccatgacatctttttgtgtcccctgacttccagccaataccttggtaccttgagacaattaactgtgtgtggcctgtgacttcctcctctctctcctcactgccttttttttttttttttgagacagagtctcactctgtcacccaggctggagtgcaattgcgtgatcttggctcacctcaacctctgcctcccggattcaagcaattctcctgccttagcctcctgaatagctgggattataggtgcccaccaccacacctgcctaattttttattttttattagaggtgggttttcaccatgttggccaggttggtctcgaactcctgacctcaggtgatccacacacctcagcctcccaaagggctgggattacaggcatgagccagcgtgcctggccctctctctccccttcacctgacctgtgacccgtccaccactcaagatgcctctgccactcattatgtctcctccctccggggacctgccttctgatccctctgcatgggcccccgactgactctccaagacccagaccgagagctgtgctgtctcctcacatcccgttctgtgtctcacccacctaggatgaaagatggtgtggaactgactcgggaggattccttcaaggcccggtaccgcttcaagaaggacgggaagcgccacatcctcatcttctcagacgtggtccaggaggacaggggtcgctatcaggtcataaccaatggcggccagtgtgaggccgagctgattgtggaaggtatggggcctccaggtagggcacgggctgcactgcgcatgcttctccacacagcttgaggttgctcaggccccccagtctggaagttgttcctgactcctctctttcccacacaccctatgttcagcccaccagggagatctgatggctccagcttcaaagtaaattttggatccagccaagcgtggtggctcacgcctgtaatcccagcactttgggaggccgaggcgggtggatcacttgagcttaggagttcgagaccagcctggccaacatggtgaaaccccatctctactaaaaatacaaaaaaattagctgggcattgcggcgtgcacctgtagtcccagctactcaggaggctgaggcaggagaattgcttgaacccaggaggcggaggttgcaatgagctgagattgctccactgcactccagcctgggcaacagagcaagactctgtcttaaaacaaaaacaaaaacaaaaacaaacctgggcgcggtggctcacacctgtaatcccagcactttgagagaccaaggtgggcggatcacttgaggtcgggagttcgagaccagcctggccaacatggcgaaaacccatctctactaagaatacaaaaattagctgggtgtggtggcgtgcacctgtaatcacagctactcgggaggctgaggcaggagaatcgcttgaacccaggaggtggaggttgtggtgagccgagattgcacactgcactccagcctgggcaacagagtaagactctgtctcaaaaaaaaaaaaaaaaaaattagccgagcatggtggcacacacctgtaatcccagccactcaggagtctgaggcaggcgaattgctagaatccaggaggcagaggttgcagtgagccgagattgtgccactgtgctccagcctgggtgacagagcaagactccgtcttaaaaaaaaaaaaaaaaaaatctgaaaccaaccacagcccccctgttgctgcccccgcctggcccaggccttccttccctcatgcctggactggtgcagttgtctcctctctggtcactctgtgtctatacctgccccttgacctccaccccccagtacccgccagagtgagcctcgtaaaacataagtgagatggtgaaaagaaacaggtctgtggtctgagtaacagtactgggtccatgtcagtgtcctggtttggatactggactccattatgtacgatgtcaccagtgggggaggctggatgaagagcacacgggactctatgtgctatttttgcaagctctaggggtctataattctgtaaatataaaaagtaaaaaacaacgaactcaagtcagttatgggtcaaacaaatgatggtatttccatatctagccataaaaaaagagaatgttttagactgggcatggtggctcagccctgccattccaactctttgtgaggccgaggtgggagggtaaattgagtccagaagttcaaggccggcctaggcaacatggcaagaccccgtctgtataaaaacatcaggccgggcttagtggctcactcctgtaatcccagcacttcgggaggccaaagcgggtggatcacctgaggtcaggagttcaagaccagcctggtcaacatggtgaaaccccatctctactaaaaatacaaaattagccaggcgtggtggtgcatgctagtaatcccagctacttgggaggctgaggcaggagtatcacttgtacccggggggtggagttttcagtgagccaaaatcacgccattgcagtccagcctgggcgacaagagtgaaactccatctcaaaaaaaaataaataaataaaataaaataaataaaatccccaaagtgctgggattacaggcgtgaaccactgtgcccggccacctcagggcctttgcacacgctggtccctctacctgggaggctttttttcatcttctggtagattcctccctgcctccctcaggcctcctcgctccctcctctgtttctttcttcactgtctcccactagcatgggagcttcccgaggccaacgggttgtttctgggttgtctgtggctggtatccccagtgcctagaccagcgcctggcacacagtgggtgctcacaagtgtctgtgcactgactagagtagtgacggctccttgtctttctctccctgaccagagaaacagctggaggtcctgcaggacatcgcggatctgacggtgaaggcctcagaacaagctgtgttcaagtgcgaggtgtctgatgagaaagtgacgggcaagtggtataagaatggggtcgaggtgcggcccagcaagaggatcaccatttcccatgtaggcaggtgaggagtgggctgcagaagtggctgggggtagggtgtgcatagcagttagctttagctgtgtaacaagctgtcccccatttatttttttttttgagatggagttttgctcttgttgcccaggctagagtgcaatggcgcgatctcagctcactgcaacctccgcctcccggattcaagcgattctcctgcctcagcctcccaagtagctgggatgcaccaccacgcctgactaatttttttgtatttagtaaagacagggttttgccatgttagtcaggctggtcttgaactcctgacctcaagtgatccacctgcctcagcctcccaaagtgctgggattacaggtatgagccaccacgcctggactttttcttttctttttccttttttttttttttttgagtcagagcctcacactgcaacctccaactctgaggttcaagcgattctcctgcctcagcctcctgactagctgggactacaggcatgcgccaccatgctaatttttgcatttttagtcaagacagagtttcaccatgttggccaggctggtctctaactcctgacctcagctgatccacccacctcggcctcccaaagtgctgggattacaggtgtgaaccaccgcacctgtcctgtccccaaacttagaggtttaaaaggatgaggattgggctcggagcagtgactcatacctgtaatcttggcactttgggaggccaaggcaggaggatttcttgggcccaggagttcaagaccagcctgggcaacatagtgagacactctctctaaataaataaataaataaattaggattcatttcatcttgagcgtgcaggttggttgggggctggctgatccaggatggcctcgttcttacctctgtggtggcaggacctggaccctgctgactttgcgtgggcactgtcaggacctcagctgggacagctgggcgcccagcacgccgctccctatggcacctcctcctcctccagtgagctcagcctagcacactcacgtggcagaggcagaggtcctgagagagcatggaagcaaatgagacttctgtggcccaggctggaaactggcccaatgccacttccgccatagtctgttgggcaaggaaagtcccaggccagctctgagtcaagggctgggaagcagattccaccactgatggggatgctgcaaagtcgcatttcaagggcatggacaccggcagggaaaagcctctggccatatcagctaacagtcaacatgggctccagctcagaaaacaagaagctgggattcaacaggtggcacgtggacacctaagacaaacacctggttatctgcagaatgcagagagccagcatgatgcctggagaacatcgtgccgttcagggcttcctggcaatagttcttggtgggatgtaggttttccctgtgttctgtgtagggaaccatgccggctggtggtctcagtaatgatgataatggccgggcatggtggctcacacctataatcctagcactttgggaggctgaggtgggtggatcacttgaggtcaggagttcgagaccagcctggccaacatggtgaaacccccatctctacaaaaaatacaaaaattagctgggtgttgtgttacacgcccatagtcccagctactcgggaggctggggtgggaaaatcatttgaacccaggagggggaggttgcagtgagccaagatcatgccattgcactccagcctaggtgacagagtgagactccatctcaaacaaacaaacaaaaacaacaacacataatgatgataacacatcctgacacttacagggcccttactatgtgccaggtacttttctaggtgtggtttttttcttttcttttctttttttgagacagggtctcaacctgtcacacagcctggagtgcagtggtgcaatcatagctcactgcagccttgacctgggctggagcaattctcccacctcagcctccccaagtgctgagattacaggcgtgagccaccatgcccggccaaagaacagtatctatttatttattttctgtagagacagggtcttgccgtgttgccctggctggtctcgaactcctgggctcaaacaattctcgatcctcagcttcccaaagtgctgggattacagatgtgagccactgcacctttctcgatgctttacaacaaccttgatgtagatggatatcattacccctattttatagatgaagaaacagaggcacagagaggttaagtaacttgcccaaggtcacatagctaccgatttgaaaatagaccacagcgttccaaagccctggataagaatgcaggcatgtggactgcactgagggaagctgattgaggcggtgcagccccatagtggtcccattgcaatctggttcgagccctaccctgctcccccaccccttaggttccacaagctggtgatcgatgacgtccgccccgaggatgagggagactacacgtttgtgcctgacggctacgccctgtcgctctcggccaagctcaacttcctgggtgaggatgccccttcctccttccctgggggctgtaggatccaccctcgcagacccagggcccgggatgtccctctccaggattaaggttccccgagtgcgaatgaggacgacagcaagcgtctgtcccgctcatggctggagtcagaagatggagggagagcgctgaactcgctgccacctgccgcccgggaggaggggtggctcctgggcctgaacctgtctccagcaccccagttcccagggagactgccagaccctgtcacctcttcctctgggctgtgaaggtggggtgaggggcctgctgagtttagacctaactgtccagtcttctttgtcttgcagaaatcaaggtggagtacgttcccaagcaaggtgagcaccacgggctgcgctgggagcgggtctgagggaggagggaccgggctgagggaggaggggaatggccgagggaggataggcagggcgaggaaggatgggcggggtgcgggaggatgagtggggagaggaaggagggggttggggtgctgaggaagggagggaggaggggcggggagctgacagacggggtgggggctatcggccgagaggagggactgaggtcctgagggaagagggattggggacctggatccctgggtctgagggaggaggggctgggggcctagactgtagggtgtgagggaggaggggttggggacctggatccctgggtatgagggaggaggggctgggggcctagactgtagggtctgagggaggaggggttgggggcctggactactgggtctgagggaggagggcttcaggacatggatccctgtgtctctgtcactgttggaacccaactttttggagattctcttgtgggaactgggaaggcccagcctcccactcccagggtccctgtatctcttctgtgccaccagagccaccaaagatccacttggattgctcggggaagacctcagagaatgcgattgtggttgtggctggaaacaagctgaggcttgacgtgtccatcacaggggagccccctcccgtcgctacctggctgaagggagatgaggtgggttggggccgcccctctgtcctcactccctttccgtttaggcaagtctctttccccctgagcctgagtttcatcctctataaaatgagggtgatggttccttcttcacagggttgttttgaagattagagattatgtttgtccatcacaggtatgggcctagcacatggtggatgctccatccattcatccattcacctttcagttaattaatcaagtgatcgaccagtttaggcttccagccagccagtaactcatccgcccatccagctgatgattttttcatcaactaattggttaattcacccagccatccactcgtccagtaattaatctgtttgtccatttatccatcaaccaatttagttatccattcatccagaaacacatcatttacccacttcaatctatctatataatctatctaatctatctatctgtctatctatctatgtatctgtgtatgtatgtatgtatgtatgtatgtatgtatgtatgtatgtatctatctatctatctatctatctatctatgtatctatctatctatctatgtatctatatttttgaaaggtggaatctcactctgtcacccaggctggagtgcagtggcgtagtcttggctcacggaaacctccacctcccaggctcaagtgatcctcccacctcagcctcttgagtagctgggaccacaaaagtgtgccaccatgcctcgctaattttttgtatttttgtagggacagggtttcaccatgttgcccgggctgggctcaaactcctgaactcaaacgatccttccaccttggcctcccaaagtgttgggattatgggcatgagccaacatgcccagccatatctatatattcctctatccatccgtccaacaaatattttaaccttgcatgtcccaggccctgggacagctcgatttttcatttcttctctgtgcttccatttcctcttctgtaaaatggacagacttgctcaacatccatccatttgctcactcagcgtacatcccctaaagttttctccgcaccaggcactgaggatgcaaccatgagttggatgcggctcctgccctccaagagccttcattttacttaaaatttatttatttatttttaaatttgagacagggtttcactatgttgcccatgctggtcttgaactcctgggcttgggtggcactcctgcatcagcctcccaaagtgctgggattacgggcatgagctacctcaccctgctcagtagcctttactcttgcggagacgcaaacacctgcccaagaagccacagtccagggtgctctggctgagataaagggaggttctagaagctatgagaacccaggggctggagccagcacttccagctaagggtatccaggaaggcttcctggaagaggtgtcttctgggtgcttcctgaaggatgaggaagagcttagtgttgcatgcacagggaccagccttgcaaaatctctgggacaaggcagtcttttttttgttgttgttgttgtttggttggtttctttttttctcttttttttttgagatggagttttgctcttgttgcccaggctggagtgcagtggtgttatcttggctcaccacaacctccgcctcctgggttcaagcgattcttctgcctcagcctcctgagtagctgggattacaggcatgcaccaccaggcccggctaattttgtatttttagtagagatggggtttcaccatgttggccaggctggtcgcaaactcccaacctcagttgatctacccgcctcggcctcccaaagtgctgggattacaggtgtgagccactgcgccccgtccagtctggtgcttttaatgaaggacggcatttggagggcgaggagggcagtggagcgagtgaggactctgtgtgttgatggggaatcatgggaggattctgagcaggggaatggcagaggcaggcctgggtttgcttggggacacgatggggtgcaaggccatctggtggctgcgttcaggtattcacgaccaccgagggcaggacccgcatcgagaagcgggtggactgcagcagctttgtgattgagagtgcgcagcgggaagacgagggccgctacaccatcaaggtcaccaaccccgtcggcgaggacgtggcttccatcttcctgcaagttgtaggtgagcagagaaagccgaggtggctgggccaaggggtgactccctgaggcctcgaggggccacctgactctcctgccccctgcagatgtcccagaccccccggaggctgtgcgcatcacctcggttggagaggattgggccatccttgtctgggagccaccaatgtacgatggggggaagccagtcaccggtgagtgcctctgtcctcatgacctctgaccttccctctttctgccttctgtttttttttttttttttttttttgagatggagtctcactctatcgcccaggctggagtgcagtggctcaatctcggctcactgcaacctctgcctcctgggtacaagcaattctcctgcctcagcctcgcaagtaactgggattacaggtgcccaccaccacgcccggctaatttttgtatttttagtagagatggggttttaccatgttggccaggctggttttgaactcctgaccccaagtgatctgcccacttcagactcccaaagtgctgggattacaggtgtcagccacggcaccagcctctgccttctccttgacctcccagagcccttagcatcctcagtgacctacctctgacccctgattttccattttcccatctcaatccctttggtcttcccgcttcctttactcgctggtgacctgggaattctcactttgaccagtagcctgggtttttctatggctcctggcctcctggttcatgagctgtgaccccctcttgattcctgactccaggactggtggcctctgaatgctctgtggcccctgagatccacctaagattcatggcctcggaccgccctggccatgcgatcctctggatgtggccctcactcccccagctgactcatgccccatgccctcccgttccctcttctcctctctgcttggagcctccagggtacctcgtagagcggaagaagaagggctctcagcgctggatgaagctgaactttgaggtcttcacagagaccacctatgagtccaccaagatgatcgagggcatcctctatgagatgcgtgtcttcgccgtcaatgctataggggtctcccagcccagcatgaacaccaagccttttatgcctattggtaatgtcctccctcacttttatgcctattggtaatgatggatcactctgatccatcaaccccgtccacctctggcccatcttttgcccgccatcaatctctgaccctaccccctggccttctgaccaatcattctacctctgactcctgccccttcctgctgacccctgacccctcattccccccatatcctctttttctggatgcttgcagcacccacgagtgaacccctgcacctgatagtggaggatgtgacagacaccaccaccacactcaagtggaggcctccgaacaggatcggggcaggtggcatcgatgggtacctggtggagtactgcctggaaggctgtgagtgaccctggcagggctggtgggggtggtggctagcacaggtgggtatccagtccagggagctgaaaataggaccatgtgggacagagatgggtgcagtggcctgcttgtgttttgtgtctgtactgttataagtctctgggatgggacccccctgtgactagtgtgttttctctcccttcttcctttctacatccatcctccatacagcagtgactttctgtcattccatctatccttccatccccccatttatcttttatcttttacctttatgccttctttctttcttctactcatttatccatctaaccaatctttccttcatccatcttaacatccacccatccatccatctgtccatccatctgtccacccatctgtacatccatccatccatatttccatccatccatccatccattcatcttaccgtccatccatccatccatccatccatccatccatccatccatcatttccatccatccatccacccacccacccactcatatttccatctatccatccatccatccatccatttatccatccatccacccatccatatttccatctattcatccatccatccatccatccatccatccatccctccatttgtccatctgtccacctgtccatcatccatccatccatccatccatctgtccatccatccatccgtctgtccatccatctgtccatccatccatctgtccatccatctatccatccatccatccatccatccatctgtccatatttccttcgtttctctctctctctttttttttttttttgagacagagtcttgctctgttgcccaggctagagtgcagtggcacgattggctcactgcaagctccaccttccaggttcacgccattctcctgcctcagcctcccaagtagctgggactacagatgcctgcaaccatgcccagctaattttttttttttgtatttttagtagagacagggtttcactgtgttagccaggatggtcttgatcttctgacctcgtgatccacctgcctcggcctcccaaagtgctgggattacaggcatgagccatcgcacccggcccagtatcattttttcatccatatatctatctcttcaccactatctttgcttccttccctctttctacctatatggccatccaaccatctgtccacctaaccagccattgtctctctgcctgtccatccatcatctgtacctccatacatccactctccatcctccaccaaacaaacattcactgagcactgacttgtgcccggcccagtgccatggctatggagatgtctcagacgcagccatctctctgggagaacagacgtgatcacctcgacacactatcccaggtcttaaagtcagacagatgcgggttccaaccttgcccctccactgtctaactgtgtgtccttgggcaagtctctgagcctcagtctcttcatctaaccatggcgaagacagttctcatcttgacagggtacagtgacgatgtactcgagaatgcatggaaaggagggatggttgaaccctcatcagcttcctccctcctcctctcctccgtgctctttaccccattcctccctggccggctgctcccaccctgacgtttcagaacccagcttgttagagttcactctgttgattgctgctctgagccaacagccatgagttccccagcccatggccataaacccaagacagaagggcatgtaacgaaaagcaggcaatctgaagagctctgaccctgccctcagcccgccttcccagacacccacctggctgcgccctcagacagagccaagatccctgcccctctgtgccagccttgcaggagagcagagcttgagagcgtgctggagtcagacaggcctgggtttaacatcctagtccacagagcctgagctgcgtgtccaggatggtcttgaattcctgggcttgagagatcctcctgccttggcttcccaaagtgctgggattacaggcatgagccatggtacctggggaaagtttttttttttttttttttgatggagtcttggtctgtcgcccaggctggaatgcagtggggtgatctcggctcactgcaacctctgcctcccaggttcaagcgattctcctgcctcagcctcctgagtagctgggattacaggtgcctgccaccttgcccggctaagtattgtgtttttaatagagacagggtttcgccatgttggccaggctggtcttgaactcctggactcaagtgatctgcccacctcagcctcccgaagtgctgggattacaagcatgagccacgggattacaagcatgttagggatggtttcccatccttaacatggggatagcacagggttgaggtaagaattaatgaacaacgcctataatcccagcactttgggaggccgaggtgggcggatcacgaggtcaggagttcaagagcatcctggccaacatggtgaaaccccatctctattaaaaatacaaaaattagctgggcgtggtggtgcgagcctgtagtcccagctactcaggaggctgaggcaggagaattacttgaacctgggaggcggaggttgcagtgagccaagatcttgccattgccctgcagcctgggcgacagggcgagactccacctaaaaaaaaaaaaaaaagaattcgtcccactgcactccagcctgggcgacagggcgagactccgtttaaaaaaaaaaaaaattaatgagcgaacagaatggccacccttagaacctggccatgatgaatgcttaactaactccagctgctgctgctgcttctactgggaacttactcagtgctcactcgctcgctgcgtggggcccaagtccccgggagaaacgggagcggaggatgggaggagggcacgagatccgccagcagggcctctctctccagccgaggaatgggtccctgccaacaccgagcccgtggagcgctgtggcttcaccgtcaagaatctcccgaccggagccagaatcctcttccgagtagttggggtcaacatcgcggggcgcagcgagccggccaccctggcccagccggtcaccatcagggagattgcgggtgcgtggcccctgaccctgcgctccgaaagaccaagctggcgtcgtcccgcctgccctttccgtgtcgtcgacaggacctccccagagagccttatcaccattggcccctggaatgcgccccggccccccgctgagccccctccctgtgtttgcgccctcagagccacccaagatccggcttccccgccatctccgccagacctacatccgcaaagtgggcgagcagctcaaccttgtcgtccccttccaggtcaggggagcggggtcacgggccgggggtccgctctcgccgcaagccccctttttgcgggtggagccccgctgaccccaccccgccccgccctctccccgcagggaaagccccggccccaggtggtgtggaccaagggcggggccccgctggacacctcccgcgtgcacgtgcggaccagcgacttcgacaccgtgttcttcgtgcgccaggcggcccgctccgactccggggagtacgagctgagcgtgcagatcgagaacatgaaggacaccgccaccatccgcatccgcgttgtgggtgcgcgcgctggggagggcccctggaggccgggaggggcagggatgggcagcgatgggggaggaggtaagagatgaggggtggggaaggaggtgggagatgaagggtgggagaggaggtgagatgagggatgggagaggaggtgagagatggggggtgggagaggaggtgagagatgaggggtgggagaggaggtgagatgggggtgggagaggaggtgagagatgggggggtgggagaggaggtgagagatggtgggagaggaggtgagagatggtgggagaggaggtgagagatggggggtaggagaggaggtgagacgaggggtgggagaggaggtgagagatgagggatgggagaggaggtgaggagatgaggaggggagggggagaggaggtgaaaagatgaggtgggggagactagataaggagcaaggcaagtaccagggctaggagtggaggagagatgaagatgggggaacccttgagagggagattgggtgaagagaggaagtggggagacatgggggtgaggagaggaggtgaggagggatgagggtggcccaggataagaggaagtggagagactgggatgggggaggccataggcaggaatgggaatggggcataagagaggttagaatcaggagggagggggtgtggagaggggaggggagggaagcggctggacatcccaaaacctggactgacttgtcacacttccccatttccagaaaaggctgggccccccataaacgtgatggtgaaggaggtgtggggcacgaacgcgctggtggagtggcaggcccccaaagatgatgggaacagtgagatcatggggtatttcgtccagaaagcagacaaaaaaaccatggtgagagagcagagggggagatggggaagagccggtgaggtgggcagagcaggtgcagatgtcccccgttcacagctggaagggcagggaggggcccagaggctagaggacgggctggggccaggagggaagccttttagctgagacttggcacgtgatgggttttcattttcttttttcactgaggtaaacgtcacataacggaattagtcattcatcgttttaaagcgaacaattcagcagcacttaggacatctgcagggttgtgcagccaccgcctctacccagtccattttcatcccccagaggaagccctgtacccaatagcgctaccccctggtctcccctggcagccaccgatttgctttctgtctccctggatttacctactctggacatttcatacacatggaatcctagctatgtgacccttgtgtctgactttgttagctcagcacaacgtctttgaagttcatccatgctgcagggtgccgggtgtgtccatgcagaaatcctgtttttagaattcttttttttgagacagggtcttactctgtcacccaggctggagtgcagtggtgcaatcttggctcactgccttctctgcctctgagctcaggtgattcccccccatctcagcctcccatgtagctgggaatacaggcacgtgccaccacatcccgctaatttttgtagagacagggtctcagtatgttgtccaggctggtctcgaactcctggacccaagtcatcctcccaccttggcctcccaaagtgttgggattacaggcatgagccactgcacctggcctttatttcttttaaattttttttttttttttgagacagggtcttactctgtcacccaagctggaatgcagtggcatgatcatggctcactgcagcctccaacccgcaggttcaggcaatcctcctccctcagcctcccaagtagctgggactacaggtgctggccaccagacctggctaattttttgatttttttaacagacaagggtctcgccgggttgcccactctggtctcaaactcccaggctcaagcgagcctcccacctcggcctcccaaagagctgggattacaggcatgagccacggtgcctgaccccttcttagcgttgaatgatgttcctttgtctgggccgactgttttgtttgtccatccctgcgctgatgggcgctgggttggttccacctgttggccactgtgagtagtgcgccatgagtgacatttttttaaacactggatgtgcttttctcaccccttctttcgtctgtgtcttgtgtgtaatcgtgtgatcctgtggccccgacccgcctggtccctccctgtccccacactaggagtggttcaacgtctatgaacgtaacaggcacactagctgtactgtgtccgaccttatcgtgggcaatgaatactatttccgagtttacaccgagaacatctgtgggctcagtgactcacctggtgtctccaagaacacggcccgcatcctcaagacaggtacagccatcctgccccacagcccaggcccaccccgtccaccctctcgcccaggtcccacctggactcctgccctcccctccccactggggttgacggcacctagtcatgggagagaggtgattgcggtttgttccctggttggtgtcaggggagaatctagatcagtcgccttacgggtgcatcctctctccccaggaatcaccttcaaaccgttcgagtataaggagcatgacttccggatggctcccaagttcctgacacctctcatagaccgcgtggtcgtggctgggtactcggcagccctcaactgtgctgtcagaggccacccgaaggtgccagggcagggacccagatctgcgtgtgtgttgccttgtggggaatcttccatacaatgaagcccactccccatcacgccagttcttcttccccgagttctctgtctcaagggatttagtcacttaaaaaatttttttaattgatttttgattttttttttttttgagacagggtcttgctgtatcacccaggctggagtgcagtggcacgatcacagctcactgcaactttgacctcctgggttcaagtgatcctcctacctcatcctcccgagtagctgggaccacaggcatgaaccactgtggccagctaattttataatttgtagagatggggtcttgctatgttgtccaggctggtcttgaactcctaggctcaagtgattctcccgcctcggcctcccaaagtgctgggattacaggtgtgagccaccacgcccagactggacttgctcacttttcacccacttcctgttagctcctctgaccagagcccaagtctcagacaatcaatcacatcttgcctttggcttcctgcctttttccttctttctttctttttttttctttctttcctgagaccaggctggagtgcagtggtgcgatcttggctcactgcaaccgcctcccaagttcaagcgattctcctgtctcagcctcctgagtagctaggattacaggcgtgcaccaccatgcccagctaaattttgtatttttagtagagacggcgttttgctgacctcaggtgatccgcctgcctcagcctcccaaagtgctgggattacaggcatgagccaccgctcctggcctcttgcctttttctttgtcccctgactgccaggtaacagcttgtctcggcagcttgaggagaggaccattaagtctctcttgctctgtccaaggacaaatgccagtcccatggaaaaagaaacgttgggagcaggggcagcctagaccagcacggctccccagggtcttcctgtccagccattttccaactgctctttgtgaacagggacacttgcaacctagagctcatttagaccaggggttggcaaaccatcacccatgggtcaaatccacccaccacctgtttctctcaataaagttttattggaacacgggccaagcatatttgtttatgttttgtttacagctactgcagacaaaatgtaaataaatgtgcgtggctcgcgttccaggcccagagactacagggcccaaaaagcctgaattatttaccatctggtcctttataggaacagtttgccagcttctggtctgggctgtaggttattcgcttcagcctccttaaggcataccatgtctccatctctgtatactgtattcactaactccactcattcatgtcactcattccactcatttatccacctaccaatccatccatttactcagttcattccttcactccatttgcttatttacagcactgtttcgtgctctcattcatttattcactccatttattcttacaacaaacattttcagaggctttcaatgacctgggtgattcgaacaagaaatttcctgtatgttgggggagactgacatttgcccagagtcacataaataatataaaattatgaagggctgggccagacacggtggctcacacctgtaatcccagcactttgggaggccgaggcgggcagatcacctgaggtcaggagtttgagaccagcctggccaacatggtgaaaccccatctctactaaaaatacaaaaactagccaggcatggtggcaggcgcctctaatcccaaccacttgggaagctgaggcaggataattgcttaaacccgggaggtggaggttacagtgagccaagatcacgccactgcactccagcctgggagacaaagcgagattctgtctcaaaaaaaaaaaaaaaagggaagggcactatggaagagggaacagccagtgccagcgtcctgaggtgggtgcctgtctggtctgtttgaaggacagtgaggtagcctgtttggctggagcagagaagtaatgggggtcaaagagtgtgggaccctgtgggccactacaaacagtgagctctttgtcctgagagcaatgggaagaccccaccgttaccctgtgaagtgggattatcaacctgcttttacataagaggagactgagggtcagggagaagtgactcgtccaagaacatctggcaagagggtggcagagcctagaacccagatcggcttcctgagccccattttgtcatcattgcccagggtctctctctaagttggcctcctctcccttgactctcaacagccgaaggtggtctggatgaagaacaagatggaaatccgtgaagatcccaagttcctgataaccaattaccaaggagtcctgacgctgaacatccgtcgcccctcgcccttcgacgctgggacttacacctgccgggccgtcaacgagctgggcgaggcgctggctgagtgcaagctggaggtccgaggtgagggcgtggccatccccaacactggctgacccttgctcgggccctgtgccagcctggccggtggccccgggctgagcaccgctgagatctggagacgagtgagaccagccctctgggaggaggactgggaagctgctgtcctgaaggcagcacagggcatcctaggagttggggttggggagcccctgacccagcttgggaaggagtcagatttttccaaaggagttgaaggacaaggaagaggaaggctgagtgagaagggcttaggaaacgtccccaaggcctccagtgtacctgggcccccgtaggcagatgggttgacagagtgagagcaaatatggataacacggatgaccaggggtggcgggagctcccaagagtgcctccctccatagcctgtccccatgctcccacccacctgcccctgcctctccctgccccgtccctcatctcggtcccacagctccagccccagcgaaagctacatcctcttcctcccatattccatttccagccgcctccgtctccagtctctccctcctgccagccactttcacccttggactctggccccagagagctctctctatccagagctgctctgccccagccctgatcccagcccgctggggactccccaccgccccagcgcccctccgcctggtgttcacggtggtgtgtccaccccggttcttcccacatgatgtcccagccacaccgggctgttggcagttacactggccaggctttcctgccacagggacttggcacatgctcttccctcttcctggaacacaattcccccgctcctttaccctgggctccggcccatcagatgtctgccagtcaaggctcagcgaggaggccactaaccgtgtccctcagagcaggatgacatcaatgtggacttccagagtccctcccggatggtgacttctgacctctgacttccctggctctgaggacagcccagcagacagggtggctggggacccttaacaaaggctcagagaggacactttctagccaagcacggtggctctcgcctgtaatcccagcacattgggaggccaaggcaggcgagttgcttgagcccaggagttcaagaccagcctgggcaacatggcgaaaccctgtctctactaaaaatacaaaaaaatttagccgggcctggtggcacatgcctgttgtcccagctacctggggggctggggcaggaggatcacttgaaccagggaggccgaggctgcagtgagctgagatggcaccactgcactccagcctggtgcaacagagtgagactctgtctcaaaaaccaaacaaaaacaccccagatcactgcccttccaagcccacccaatttctgatactctgctgtctccctgattaactattaaatcagctcagaaaaatcccagcctcaggattccagtgaccgcgtacagccagcagctcagaatgtccccatctgggatccaaaataccagtaatcaggagcactgtgactctgggttgtccagccacagtggcctaggatggggcgggatggtgaccgtcatcctgtccccctgctggtcatgtggatgcagctcctcctcctggggcttcaggaggaggcgtgcccgggcctggctcacccgctttctcgttttcctgcagtgccgcagtgagacctgtcccctacctgccaagacaattggtggtggagtcctgaccccaatccccaacctcccaggactgtgttctttctggagttttcgctgagaacaaaacagtgttgtctggaccctggagtgtctgtccttcttgactccgtagctccgtcttcctcctgcaggggattggtcaccccggggttggcgacgggagcagctgcgtcgacacaggccgcggtgaggtggcctcttggaatagctactttagcgaggcagccacgttgtcacagcaaccacagagcatcagaggtgaacccaagcccacggggaggccggccccagagaagctgctgggagggagggagggtgcaggctaggggcaacgacagtggcagcgagtcaaagacacacccaggccacacccagaaggccactctaccgaagcagctgtgtcgctgtggccgcctctaggccttggcagcggccccaagagctagacgtggtgaaccgaagagggaggcagccgtactggacaaactcctgccaggcagctgcgcggacttggtgacgaaggcgaaaccgctcgtggcctgcttgttggttcttaatggactgacctttattaactttaatatctcatctgcccggccctgaggcaaggtactttgatctctggtcattcggtgaccttgaaggatgctggaagactcagagtccccagagttcagaggtcttggggtcaagtctggcttccacgccttggggctggggagagagagtttgtttcagaggccttggcctgcagttagggagtgagggggcggggagggactttgcacttactggaatggcaggggaagccaggtgtcctaagagggggcacagattccagtgcccccagcttctaaaactggcatcatcccctgctccaccttgacccccaaggccctacagagaactggacattgggcctggctgaccccactccttcagggcacaggttgtccctctctagaccctactctggtatgtcacggggagaggggctggggcacgggtgtgggtggctgtgtgtgttcccaagtaggatacgacagcccccttggctaggggtgccaaggccctggagagactgctggcttctacccacagacccccatatccctgggtcacctctacttccagaaccaggagtccaggccccagcccctcctccctcagacccaggagtccaggaccccagccctcatctccctcagacccaggagtccaggacccaagctctctcctctcttagacctgggagtcctcagacacctcccctctgccctctgctgccccactgcgcttcccccctctcctcacctcctcccactccctctgggcctccacctcatcatcatcaccctccccatctacatcctccagcacctcttactcctgcgtgaagggcacagcagaagcagagaggaagcgcaggcggtagagcagccgcacccactggccgaactctcggtctcgggtcttgagtggggcccgcagctgcaagtagaaggtgcggctggtgttcaacttgacctcgagctgacaccggcttttgtcgtggacaaagagctggacgaacttcaaggggaacagcctgggtgggaggaaggggcggcctcaggttctgaccctgtcgggtcctccagcaccgtcggggtcaggggtccccaccttgccacccctccctctgccccacgaatccctttccactttcattgcctcttgaacttgagtccattcccaactttcttccagccacatgtctcctttttgtctcccactagtcctctcccctaaactccagactcgaatatacaactgcctacttgaaatttccatctggggccaggcgtggtggctcacgcctgtgatcccagccctttgggaggctgaggcaggaggatcacctgaggtcaggagttcgagaccagcctggccaacatggtggaaccccatctctactaaaaatagtaaaaattagccgggcgtggtagtgggtacctataatcccagctactttggaggctgaggcaggagaattgcttcaacctgggaggcggaggttgcagtgagccgagatcacgccactgcactccagcctgggcgacagagagagggactgtgtctcaaaaaaaaaaaaaaaaaaaaaaaaatcccatcttgggtgtgggatctaccatccgactcataacatgttcaacagcccacttctcaagctccctcagcccctcacacgcagcctactcctcttggtcttccctgtcttagctacatccccctcttgcttggtcaaaatcttggagtcgctgtggactccatgttctcacaccctgatgagtcctgacaccacatcctggtggctccactattttttgttggtttttgagatagagggtctcactctgttgctcaggctggagtgcagtggcacggtcatagctcactgcagcctcaacatcttgggctcaagcaatcctcttgcctcggcctccagagcagctgggactatacgcgcaccaccatgcctggctaatttttctatttttatatagtagagatggggtttcaccatgttggccaggctggtctccaactcctgggctcaagtgatcctctcgtctctcaaagtgccgggattataggcatgagccacctcactttgcctgccacctttaaaatgtatccacaatccaaactcttttaactccctcctccgccacccttgcgtccagccacctgcctcagccctcagtccctacagtctgttccccacaagtcccccagaaggcgcaggtcaacaccttgggcagtttgggtccctctgctcagagccttcctgtggctctggctcaacaggaataaacacaaagccctcaccgtggcccacagacctgcagagccccttgctccctctctgccctcacctcctgcacctccagccacactggcctccctgctgttccatgaacacaccaggctcagtccgaccctagcacctttgcacagatggttccctccacctgaaaagccctttctccaggcaagacccgccccctcatcgccctgtgtttcaggaggcatgttctcagggatgtctcccctggcctatttcaaccacatccaccctgttgagacttccccgtagtcctttccggtctgacggagccccacaggccttgcccatctaacaaatggccacctgttccctctgcctgcctggtagagtgggagctcctggagggcagggagttcctggaggcctgctttgtccagtggtgaaagtttccctggtacccgcagctgacacgtggcaggtgctcagtggatgcttcagtggatgctttttgagtatcttggtaaattgattgctcaggcccgcagcccgatttaaggtccaacagggcagagcaggaagcagtcaggaaagagtgaggatcttggctcaggtcacacagccaggattggagcccaggtcccatgttcacctacaacactgagtagccaggtggcctctctggtccagcagtatcactgccaggaatggatctcacagacaccctcacacctgtgcacagacacatatgcgcggatgtcccctgccacaccgcctgtaaccgagatgccaacaaaccccagtgtccctcagtgggtgacttgatttttgtcccccaaatagaagaataacagctgacatttgtggagcacttactcagagccagttgctattatatttacccagtttttcccccgacaaccttatggggtgtgctctcctcttatccctgtcatccagatgaggaaactgaggcacaggcaggtaggttgagcttggccaaagccagtgatgaagtaacgccaggatttgaaaccaagccgtctgagggcaggcatttgtttaaggacgttgcctaccactttaacatgaggaggctggacacagcttggtgtctaagacagcagagcacgtgcaatggtcaaaaagaatccaactgtgcaggctgtgcacggtggctcaggcctgtaatcgcagcactttgggaggccgaggcaggcggatcacctgaagtcaggagtttgagaccagcctgaccaacatggcaaaaccctgtctctactaaaaatacaaaattagctgggtgtggtggcacatgccagtaatcccagctacttgggaggctgaggcaggagaatttcttgaacctgggaggcggaggttgcagtgagccaagatcatgccactacactccagcctgggcaacaagagtgaggctccgtctcaaaaaaaaaaaagagtccaattgtgcaaatatgtctgaaagagtgtggtggctgtgctcatggcaatacaaaacggatatgggtgtcgtgctgacgagggggtgggcgcagggagaagtggcgtatggcttgtggctactgctgtttttttttttttttgagatggagtctcgcactgtttcccgggctggagtgtaatggcgcgatcttggctcactgcaacctccacctcctcggttcaagtgattctcctgcctcagcctcccgagtagctgggattacaggcgcccgccaccatgcccggctaatttttgtattttttagtagagagggggtttcactatgttggccaggttggtctcaaactcctgacctcgtgatccacccgcctcggcctcccaaagtgctggaattacaggtgtgaccaccgcgcccagcctgtggctactgctttttattttattttttgagaaagggtcctgttcccattgcccaggctggaatggagtggcgtgattacagctcactgcagcctggacctgctgggctcaagcaatcctcccacctcagcctcctaagtagctgggactacaggcacaccccaccatccctggctaatgtttgtatttttagtagagatggggtctcactatgttgcccaggctggtctccaactcctgggcttaagcagtcctcccaccttggcctcccaaatgctgggattacaggtgtgagccactgcacccagccttctactgctggtttgtttgttttgagatagtgtcttgctttgtcacccaggctggagtgcagtggtgagatcttggccactgcaacctccgactcctgggctcaaatgattctcctgcctcagcctcctgagtagctgggactacaggcgcccatcatcatgtctggctaattttttgtatttttgtagagatagggtctcaccatgttggccaggctggtctcaaactcctggcaatcaggtgatctgcccacctcagcctcccaaagtgctgggattacaggtgtgagccatcacacccagcctctactgctgtttttaaagaaaggatggatccatatatatgtgtgtatatatatgtgtgtatacatgtgtgtatatacgcatacatgcacgtgtgtgtatacgcatacatgcacgtgtgtgtatacgcatacatgcacgtgtgtgtatacgcatacatgcacgtgtgtgtatacgcatacatgcatgtgtatacgcatacatacctgtgtgtatacgcatacatgcatgtgtatacgcatacatacctgtgtgtatacgcatacatatctgtgtgcatacgcatacatacatgtgtatatgtatgcatacatgtgtgtatatgtatgcatacatgtatgtgtgtatatgtgtatatacatgtatgtgtgtaagtatatatacatgtatgtatgtatatatacatgtatgtgtgtatatgtatatatacgtgtatgtatatatacgtgtgtatatgtatatgtacgtgtgtgtatatgtatatatacgtgtgtgtatatgtgtatatatacatgtgtgtatatgtatatgtatatatacgtgtgtatatgtatatatacgtgtgtatatgtatgtatacgtgtgtatatgtatgtatacgtgtgtatatgtatgtatacatgtatgtgtgcatgtatatacatgtgtgtatgtatatatacatgtatgtgtgtattatatatacatgtatgtgtgtatatatgtatatatacatgtatgtgtgtatatatgtatatatacatgtatgtgtgtatatatatatctctctgtcagaaactgccccagaatagctcagggctggaagttggttagacagaagtgaggggctaggaggtgagtcctgaggccaaatttgcagagcaagctcaatgttctcacttcagtggtatgttcatttgggaaggggttttagggtgccaaaggagcttatgagagggtcatagccactctcagcaccatcattggtgttcttccaactgcaggtcatgattcagtgagtgatgagatcaattggtgaaatacagttagcatttaaaataaaaggggctgggcaaggtgggtcacacgtatagtcccagcactttgggaggttgagggaggaggattgcttgagcccaggagttcgagaccagcttgggcagcatggtgagacctgtctctacaaaaaaatacaaaaattagccaggtgtgggtggtgcacacctgtagtcccagctactcaggcagctgaggtgggaggatcgcttgcgcctgcagagaactgtgatcactccagcctggatgacagagtgagaccctgtctcaaaattaaatgaatgaatgaataaataaaggccaggcacagtggctcatgcctgtaatcctagtgctttgggaggctgaggtgggaggatcacttgaggcccggagttcaagaccagcctgggcaacatagtgagatcccacctctacaacacataaacaaaaataaaggtatagtgtagaagagaaaatatctcagggtactgtactggtgtcagaatactcctttgtgaaaggtttttaacttaggcagggggattaataaaggctgtaagtcatctcgagtacatgcaggtcaaaatctgatttggccacgaaattagaaaagcaatcttttggatttcagaaatgcagagaaggaactgtggaccttcatgtgtgcatgtgtgagacaatgtgagtttgtccttccttccttccctccttcctctatttctccctccttactttcttccctttcttcttttctctgtcttctttcttccctctctttctttcttttttagagaacgggtctcacttcattgcccaggctggagtgcagtggtgtgatcacagttcactgcagcctcgaactcctgggctcaagtgatcctcctggctcagccccagtagctaggaccacatgtatgtgtcaccatacctggctagctttgtaattttgatttttgtagagatgggggtcttgctatgttgcccaggctggtcttgaactccaagcctgaagtaatcctcccacctcagcctcccaaagtgctgggattacaggcatgagtcaccatacccggcatctctctttcatgaactgtgagatgtggtcaaaaaagtgaaagccagacaggcatggtagctcatgcctgtaatcccagcactttgggaggcccaggcaggcagatcacctgaggtcaggagttcgagaccagcctggccaacatggtgaaaccccgtctctactaaaaatacaaaaattagctgggcgtggtggcaggctcctgtaatcccagctactcaggaggctgaggcaggagaattgcttgaacccaggaggcagaggttgcagtgagccgaggttgtgccactgcactccagcctggagactctgtctcaaaaaaacaaacaacaaaaaaagtgaaagctactggcagaatgtttctgtactgtaggcatgtaaacatttcagtgtttgtagctggagttggggcaggagccttgggtgagaaaaaggaacagcttctgctgtctattttgtgcttgttttctcgtttgtttgcattactttttcttttctcttttcttttcttttttattctctctttttttttttgagacagagtctcactcattctgttacccaggttggagtgcagtgggatgatctcggctcactgcaacctccacctcttgggttcaagcaattctcctgcctcagcctcccgagtagctgggattaccggcgcccgccaccacacctggctaatttttttttttttttttgagatggagtctcgctctgtcgcccaggctggagtgcagtggcgcaatctcagctcactgcaacctccgcctcctgggttcacgccattctcctgcctcagcctcccgagtagctgggactacaggcgctcaccaccacgcccgactaattttttgtatttttagtagagacggggtttcactgtgttagccaggatggtctcgttctcttgacctcgtgatccacccacctcagcctcccaaagtgctgggattacaagcgtgagccaccgcacccggccctggctaattttttgtatttctggtagagacagggttttgctatgttggccagaccggtctcaaattcctggcctcaaatgatctgcctgccttggcctcccaaagtgctgggattacaggtgtgggccaccgcacccgatctgcattactttttcaatgaaaaaatatgacgtaaaggggcagtgtggagtgaggcacaggagggctcaagaaccatgagatccacaatcatgacaagcttggcattccaatcctggcccactctggagccacagtgggaccctgggcaactggctcccggctctctgagcctcagtttagctctttggcggatggggctaagggaccccaccatgtgaagatatgaggtcagaggtgagatcgtatgcgcggcctaggggcgtctggcatgagcaggccctgcggaaatgatcattctcctgaccgctgctggggcatggctgaggactgtccccttcaggtctgtctaatctctgatttctggcccctgagggctgctctgtccttgttctcccgggtagatggcagctcagggagggccggtagcactgccagctcctggccctgggggtggtctggacgaggggaggtactgctgggggctcaggtgcctggagctgagggaggaaggggtctcggctgaggtgggggcagttacccgaagagttgcaggtgtccgttctccttggcagggccggccagaagcaataggtccgggagctccagggctggactggaggctgccacccccatggtgacctcgttggcaacttctcccaaccgagtcacctggggccagaggtcagaggtcggggcaggatagatgtcggggcagaactgaggagggatcagaggttaggaatcttggtaggggaaaaggtcatgaaccaggtgagttgaaaatcaggctgggggccagatatcttgaaattaaagttcaagaatcatatgggtgtgaagtcagggaaactgaggcaagggagttacaggccagggttcacaaagaatctagagaactagaagtatggggtgtcagagatcacataggagttgggagtcgggaatcccacgagatggacgttatgggggagcaggggctttccaagtcaggaggaggtcgaggggcaggccgaggctggggatgagggggttctggggctccctacctgtacgaagttgctctcaaagatggggaagtcccgaaactggtcgaattcgccgctctggaggtagcgttggagccgtctgggacggcccgtgggagaggctgcaaccaggaggcattttaccaggacgaagtctgggggtcgatcctgggaggctgtgcctggcttcccaactgagagggcccggcacagccccgcggagaggacggggtatcagatgcccccgaattgccggccccatcctacttggttccttcaccaggtccaacccctctaggcctggctcccctctctcacctgccatcccacctggttccacctcgccagctccacccagggccggcttagggccgcgatcccgcctcattgcaatgtccccgtccgacgggagcggacggaggagcagagggagaaagcgagggggcgggactacgcgcactgtgacgtcatgatgcggagcgggctttatgacgtcacacaagagcgggctcctgatttgtgatgacgtccctggagggggcggctcctggagatcaggccaaaggggcggccccatcctgctgacgtcaggccccaggtgcggacgggtgccagtgcgcaggtgccggggcccagcgcaggcgcacgggcgtcaggatgcggcctgttcctcccggcgtgctccgcggctcttggctcacagccgtcccttcgctggtgggaagaagccgagatggcggcagccagcgctggggcaacccggctgctcctgctcttgctgatggcggtagcagcgcccagtcgagcccggggcagcggctgccgggccgggactggtgcgcgaggggtgagtgctctttagctgtgcatagcgggcgcggtctacggatgtcgcaggtcttgggtctttaggtgagttacagacggaaggaggctgcgcagggctgagagggaagaggtgggagatccctggaaagccaggcctcagtcacgcacgcgcaggaggggcctcgccagtgcaccgggttgcaaggactgggtgggaggacaagcgcacctgtcggaaggctctggctcgggaatatgtatgagggggcggggctgggggtgtggaatcttggagaatccgacgtccgggcggttgaaatgaaagaggcaaggtgaagccgggcgcggtggctcatctgtcatcccaacgcttagggaggccgaggcgggaggattgctctaggccaggagttcaagaccagcctgggcaacatagcgagccctgtctctacaaaaaatactaaaaaaaaaaaaaaaattaggccggtcgcggtggctcatgcttgtaatcccagcacttcgggaagccgaggcgggcggaccacttgaagtcaggagttcaagaccagcctgctcaaaatggtgaaaccccgtctctactaaaaacacaaaaattagctggatgtggtggcaggtgcctgtaattccaactactcgggaggctgaggcaggagaatcgcttgaacccaggaggcagaggttgcagggagctgagatcacgctactgcactccagcctgggcgactgagcgagaccctgtctcagaaaaagaaaataaggcgtgggagggggctcttgaggaagtggagatgagttttgtctcctaaatatgcgtgagtatgcaagtttggaggttggagaaaaggaaagcatgaatcttgaatgtgcttaatagggactgaactcaggctgcatcttggctattgggctgtcaggtgataaggaggccatttgaatattagcatgaaaaagaaggcttgggagagggagagtgtcatttaactcatgagtatttgtggcgcaaggcttggaagtgaccttgggatagttgctttggcaatgaggttaggcatgtttgtagggtctggttttctgggggtgagggagtgcagagtatgaatattcatgaaatgggtggtttctagtgaaataaaggcaagcagcagtgattaacttgaagataaggctcctccctcagcccaccagtctgtctgtcctgggttctgtgggtgactactatgctgagggcttgggtggtcctcacctggggccttctgtgtcctctgcaggctggggcggaaggtcgagagggcgaggcctgtggcacggtggggctgctgctggagcactcatttgagatcggtgagtcaggcaacgtcctctcctagacacttaacattggtgccctgagaagtcaagacttggagtctgggtgcctcccgtcgtatgacatttactaacaaccatttactaacagatttgcctcaggttaggggaaagtgggacatgaaagaagagaaacactctttaaatgcccccttgcctgtgagacaaacctcagtttttaaaaggtcatcacagcagtaataatttcagagcggctttcctgatcagtcgccacgtgcccagcattagcggttccacgctttgcaagtattaactcagatgtcctcacagcagccatgtgaggtggtaggtattcgtgtcagcccctttttccagaagaggaaacgggctcagagtaggcaccacacaaggtctcatcgtgagtgagtggcagagcaggggccagcttcaaacccaaacttaaattgccatgatgcaggtgtccaggttcccagagctggacgtcagtgctgcccagagtgtagtaatcgagtctgaggccccgaacctgagggcacaaaccctgaagctggtgcccctctgcaaaccctggcatctgctcagtgaacagctcccctgattctgacatggccaggtagttgggaattcctgaactccacagcctccgtattttgcagttggggaagctgaggctcagagaggttgtgtggctatccctgggtcacctggtgaggcagaggcaggatttgggagctgtggggttcatgcatctgctacgggttgccttgtgaggtggaacatggtggaggtgtccccactttgcagatagcaaaatgggggcccagatggggagggaacctggtcactcgggtggaggccaggccaaaatttgaagctggacctcctggcccctgcctgggttgaagggtgggcgggggagggggcgtctctgaacctgagctcctcacagatgacagtgccaacttccggaagcggggctcactgctctggaaccagcaggatggtaccttgtccctgtcacagcggcagctcagcgaggaggagcggggccgactccgggtgaggtggggccctcagggctgggtgtggatggggatggagggtttccagctgtctcttcagccaccccctgctggtccccagcagccttccctccaggcccaggtgggctcccagcaccacctgccactctcagcctctgtcctcaatgactgcccctggaggaacggcattgcagttcgtcttagcgccgccaggcatggtgtcctgcatcacggcctcttcctgcactgctccctctgctggcagacccccttcccctgcaggttcacacagtcggctcctcttcttttccagatcagctgagctgtttcatgaccacttagatgagatttgtttgtgaggagaaagcctcaaaatagctatggttggacaggagctcacttctgtcgccctgtgttgtggcagcctcaagggcccagctcaatcctccgcaggggtcatgcagagaggccccagggctccaggcagcaggatagagagggagaaagaggggcagaaggagcagcagcatttagagaaagcttgcaaaagctggcacaacccacttccacccatcagccagatgtagctgtgagggaggctggggagtgcaggcttgattctggtggccacgcggtgaggtctgcctgagcacccttcctgcatggtacccacatgattctcttgtcacagctgtccccaaacagaatttattatgcatgtaactggtacgtccaggcatagggtggacgccaggtgcagctggatccaggcacagggaaggcgtcctcaggacccactccatcgctgggctgggctttgccctccttgtggtggcttttcccctaggtggggcggtcccagctgctcctggcctcacccaccagccgggccaccccaacaggaagagtcctgggtcgactcaggttggctggcctggggagtgtgggccgtgaggtgggtggggctggagaggggccttcgcggaggcctggtgggcatcacagcctgtccagggctgacaccatccttctgaccagcaccctcttctcccatccccaggatgtggcagccctgaatggcctgtaccgggtccggatcccaaggcgacccggggccctggatggcctggaagctggtggctatgtctcctcctttgtccctgcggtgagttggtgtcggggatgagcccccttctccctcgtcctcctcatcccctaccctggtcctgcttccaccattcgaacccctgtgtttctggagcccgcagaggcctgggagactcagacctggccttgccttccgaggcctcctggtctggaggggtcggtccaggtagcgggtgctttcatggggatagcattgtgaggactcccgggtggggggcggttgaacttgggcctgagggtaacagggagccatgggaaggttttgaaaaatgctccgggggtcctgtggtgggggccgggggaggttagggtggagcccaggcagcaggctccccacctccactgaccccactccccccacagtgctccctggtggagtcgcacctgtcggaccagctgaccctgcacgtggatgtggccggcaacgtggtgggcgtgtcggtggtgacgcaccccgggggctgccggggccatgaggtggaggacgtggacctggagctgttcaacacctcggtgcagctgcagccgcccaccacagccccagggtgagcctctgctgccttcgcggcgctcttgccacctgccccggcccttcctggcggcctcagggtctccaggtccctggactccgggcctcacccttctcctcctctccccttgccccagccctgagacggcggccttcattgagcgcctggagatggaacaggcccagaaggccaagaacccccaggagcagaagtccttcttcgccaaatacgtgagtggggctcccccgcctcccctattcccttcctgacagtcccggtgcctggccaggccctccatgctcccacccagactcccctatggtgctcgggcctgctccttgtcctccgggcctcctgtgtgtcctggtacctgggctgaggcttgtttgcaggaagagggtatggaagtgtggtcaggggaggtcgggccagctctagggcgcagggtcctgggggaggtctcggcctgagctaggttggagccatgaggctggagaggaagggaacagtggaggtttcaaaggaaccagggaggcttggaaaggaggggcgagcaggttcttcagggggttgtacaggaaggagagaggagtgggtccgggagggatgtggcccagggaggggcattgggggcagcagggtgcctgggaggcctcctggagctgaggagggaggggcctgtgctgccagcagcaggtctgagtcccgggggcttagaggctgaggcgtggggtggggaggctggggacagccggaggaggtggcttccacccaggcctctggtccattgagtgtggagactggtgttaggttgtggcacaggagcccaggcaggccaaggccagcgaagaggtctgtgtggcccgaggcaggctaggaggatgctgaggctgggatggctgagccctgctgtgctgagtgccctgcctgagggcctcacccgctccgcctggatagtccaacagttgtgctgcagggaactgaggcccagaggctgagcccttgcctgctgggccctgccctgctgcccactcgagcgccctcccactccctgctggccctcaggccccacggcagcccactggccctgacctgcgctccctccctccccagtggcacatcatcctggggggggccgtgttgctcacagccctgcgtcctgctgcgccagggcccgcgccaccgccacaggaggcctgagtgaggaccgagacccctgcccctccctgcgccccactggccctccctgacctgtagtgacgtaggggacctgggcgccctccccttacgcgacctcccctcatgccggtccccaccgtgggtgggtgatgcccacactcacctccttcccctctctctctctttctgtgtctgtctgtccatccttccgtccggctgcagtggatgtacatcattcccgtcgtcctgttcctcatgatgtcaggagcgccagacaccgggggccagggtgggggtgggggtgggggtggtggtgggggtagtggccggtgagggcccaggctggtcagcgtcccgtcttgcacacccaggggcctccctttctgctggagtcccctgtgtcctcagccatcccaagaagggtttgctggtccctcctttccccccgtcccacgaggccacctgggccagccccttgtcctctgccttctgctggcagaggagcagctggactggggcctttggcacagcagccggtgtctcctgcgcccgcctcccccatggccccatgcagccccaggggcttcccccctgcccatggagtagagcccgagatcctggccactatgccagttctgacctcgcatccccctaccccgagcccatgcagtctgggaacatgccgccttctctccagcctctgtgcctttgttccaggtggtctcaccctcctgtccctggctgggctaggtggtcctgtccaggctcctgcagcgcccccctcactttgacactggactaggatgcagcctcccttctgtgtccccttgagggtaccctgggtcccctcatcaggggcagaggcatgaaagagtcggggctggatggccgggggcttctgggcccgacgcctagtgcagcccctggggtcgtggtttgacatttgtctgcctggtgcaaacaaggaatccttgcctttaaggtgacaggccctccacaggcttccagacttgaaggaaaaggtttaagaaagaaaacaaaaccaacagttagtggagtcaaagcccagacactgtaaatagaaccccctccaccaccccccgccgcccagcatcctacctggactgcggtgctacgagggcctgcgggcctttgctgtgtgccaccctccctgtaagtctatttaaaaacatcgacgatacattgaaatgtgtgaacgttttgaaaagctacagcttccagcagccaaaagcaactgttgttttggcaagacggtcctgatgtacaagcttgattgaaattcactgctcacttgatacgttattcagaaacccaaggaatggctgtccccatcctcatgtggctgtgtggagctcagctgtgttgtgtggcagtttattaaactgtcccccagatcgacacgcagctagcctcctgcattgtatggttataaatagcaccctagtgagtgctgtcgtccagtctctcttgggtgtggtttgaatgatctcgggatgcatgactaaaatggaattacgatggcagatcggaaacgcgtttataaacaagtgatggtttgtgagtcgactgtcaagaccaggaggtggtgcaccgtgggaggttgccttccctcccatcacttctttttgtttttgagtcagggtcttgctctgttacccaagctggagtgcagtggcggtaccttgactcactgcgacctccacctctcaggctcagcgattctcccacctcagcctcctgagtagctggaattgtaggcgtgcaccaccacgcgcagctagtttttgtattttttgtagagacggggtttcaccatattgcccaggctggtcgtgaactgctggactcgagtgatccacctgcctcggcttcccaaagtgctgggattacaggcgtgagccaccgcgcctggcctatttttggtaactttaataaagaagatagtcttagcattgctaacttctgtttctttctccacctgcaggagatagcttatgctttttctgtcttcattccatgtgaatcctgcttcattcttttcctagaggattccagaaatatttactaatgctttttttttttttttttttttttttttgaggcagagtctcgctctgtcatccaggctggagtacaatggcacgatctcagctcactgcaacctccgcttcctgagtttaagcgattctcctgcatcagcctcccaaatagcggggattgcaggcgcccgccaacacacctggctaatttttgtattgttagtagagacagggtttcaccatgttggccaggctagtcttgaactcctgacctcaggtgatctacctgcctcagcttcccaaagtgctgggattacaggcatgagccactgcgccaggcctactgatgctttttgggaagtgttcccaacttggagtcctggtccctgtgtctgatctgcagatgtcttctaccccggcactgggggaacatcttatttttcctgggttaaacattgggatctttataaacctgattatgtcctttccctctaagtctcggttgctttcaggctggcagggttactctgttgggtattccaggaaatgcctgagctccttcaggctcccctagcgttctgttcttattaaacttttcttccccgtctggccggtccttggggaacccactcactattttattttattgaccgggttatccagggatgaagtatgaaactcaaaagatagagtaggttggccaggcatagtgattcatgcttgtagtcccagctgtttgggaggctgagacaggaggatcgcttgagccccagagttcgatgcttcctgagctgtgattgaatcactttactccagcctgggtgacagagtgagaccctgtctccagaatagacaaaagatgcagtggaatccacgtccagaaactgtatgctcactctgggctccagcacccacttcccctccctggaggcagcctgagttttctgtcccctggtatgctgcagatactctccacagaaacaagcagatgcacatgtcaacagttttgcaagtgttgctcttttcccccaccttcttttgacatagctggggcagtttccatctctggtataaggtgccatcttattccatctctggtgtaagagtgtgttgctggatttgagtagttctaagcagcactgcaggagtccccctgttctgctgcatcattttgcacacatatgtgtctgtggaagacatggcccggtggggccccaccttgctgggggagagggatgtgtgtgtgatggtggtgcatgcttcccccttgctactccaggtgtctgccccatcccttcaccctggaggttccagacagcccctcttcaccagcgattccccaactcatctccagctcagatcccacccctgatctccagactcatggccccagctgcctcctgggctccttccccaggatgtgcctcaggggccactaaaggagccagtgcctcccacctgcccggatcgggtgctcctccagggatctttgttccagtgagtggtgccatcacctgcccaacctcatggaccagagcactgccctgtcccaatcacgttctcctatgcaccaccatacctacccctaaagttcttcctggcctcatcccgtcacctctgtctccatggccttggtcccagctcaagcctcgtcctctgccacctggaccatcggcccagcctcctctttggcctcccagcccccaacatccccccctcagtccatccccctaatggagagcttcctgacactagagctgacctcactactcccctgctcacagccctccgcgtggcctctcacctcccccaggatagagtcccaacccatccttctgtgtctcctcctctctgtgtccactgtcctgaccctaactcaatcctcattctctgcctcctggaccctcatcctagcctcgtgacttctggtctaagatgtgagagcacctggcaaggtaaatgctccaggaggggttgctccctcccatttcctgccaccagaaaatgttatcggctgcgtggcattgcgaaagccttcctcttcccagcctagggtttcatgtgggcatttaggtgctcccagtacatagttgcatggcaaacaatcctaaaatatacaagactacatttagtattttgtaaaattctttactaaccccaaattgtctactggaaactataggctcctttttttttggtgggtggggggcaggtgtgtttgtgggatggagtttcacttgtcacccaggctggagtgcagtggctcaattttggctcaatgcaacctccacctcccaggttcaagcaattctcttgcctcagcctcctgagtagctgggattacaaccgtgtgccaccacacccagccaatttttgtatttttagtagagaccgggtttcaccatgttggccaggctggtcttgaactcctgacctcaagcgatccaccttagtctcctaaagtgctgggattacatgtgtgagccaccgcccctggcctctgtaggcttctttaacccatcagagagactccctggtaaggattaggggctaattactggtgcctcttcagctgtcagtccatcctcctttatttgtacccaccttccagtcagcaaggcacaacaatgttgttacaaaggaaacaaactcaatttggcccatttcctggaaatgcaatctcccaaacaggtttgtgtgaaccaaattccattttcctttgtttcccatgtgcagtcccagttgcatttccatgggagccaatccacccacccatagaatgacttgaaaatgtgtgaagttcagaagtttcataccaagaagtttgctgagcatgatgtttgtatattgattaggagtaaaaatgttcatttttacaaaatattacaacttctccctctcccctccttccacccagtatcccctgttcctcccccaggcattctggtcactgttcctttttgttgagatcattctcggtgtctcatatagctgggttgcagctccgttctttgccaggaggtggtaatagaggattccacgcactcagaatgcctcaggccggcgcctgtggcttctctcaatggagggaagtgtcctgcagggggcgctgttggtccttcaggcaaggtcgggttccctcgaagtctctgtcttagcagttgctggtcttcagaaacattgggcaccaattttctcatttctgaaatggaattcaggtgaggtcccctcagtgctgaggtgcttcatgttgtcagaggaagagttgggaagggagcggaatggagcagaaaggcgtcatccgctgctcactgagctcagataggaggccagggatcggcagattcaggagcccactcctggccaaccccaggggccccacccagtcctgtccctgctccttacgtgctgtgtatctttaggcaagttgcttcctgtctctgagcgtcgtctttgtttccgccttcctgggcctacggcaggcctgattcctccaggcagtgtccagagttccggacagatggaaaaggaagagagaatgggtgtcacaaaggtctgtccactcctgggcctcaggcttgggggccctgctcagggctagcctgtttgggcctcggtatggactcctgcctcctggtcaggacctggaaacctgggagcaggcaaggcaggaacaggagagggaggcaaaggcccaccaggcagggatgcaggggccacctggagacggaggagacggggctcccgggagggaggccagtgggagtgagagcttgaaggagagagagccaggagaggagacaggtccagagaggagggaaaggaaaggacagggcagagacagagaaaccagagagagggaaggaagagagacccaagggggagagacagggaaggaagagggaggtgagaagaggaagaggcagattcagaggagagaggagagaaaagaggtggaaatcaaacaggagaaagagggaggagaggagggaggagagagtgtaggaaaaaagcaggaggaaagagccgggcacggtggctcacgcctgtaatcccagcactttgggaggccaaggcaggcagatcacgaggtgaggagatcgagaccgtcctggctaacacggtgaaaccctgtctctactaaaaatacaaaaaaaaaattagcagggcatggtggcaggcgcctgtagtcccagctactcgggaggctgaggcaggagaatggcgtgaaccctggaggcggagcttgcagtgagccgagattgcgccactgcactccagcctgggcgacagagcgagactccgtctcaaaaaaaaaaaaaaaaaaaaaaagaaaagatggccagagcaggaggggagagaggaagagggagaaagaaggaaacagtgtagggggtcagaagtggaaagagaagaaaaaacagaagaggaaagaaagacgagggggtgaaaaaagggacaggaaggaagagagggagagggtgggtgccatggctggtgagctcggagaagagggaagcagagaaacgggtgaaggagggagcgtcctagggagaagtgggtgggggagagggtgttgggggagaagagggtgggggagagggggccccgggagagggagggatggaggagcggggagctccagccagagaagaggaaagagaaaggagagagctaggaactgggaaggaaaagagctaggaggagaccatgagacagaaagagaagagggtgaagagagaggatagtggctgggaggagagaggaggagggaggagcacagagggagaggagaggaaacagccagagaatctgctagaagggagagaggagagagaagagccggacagggagagcagaagtgagaaaaaggagggtggccacagagaggacagcgagaaaaagagaacaggaagaggggaaaagagaagaaatgggagagggaagaagggtgggagagaaaacggaacagagagggggcacagacagcggactggaccgagagggagatggagcggtgcggagggggagagagaaagagggagggaaggagggtaggagagggctggagataggggaaaagagaaaaggagggtaggagagggctggagagagaagggaagttaagaagggaaggagagagacagacattagggaagaaggaaaggagaaaggaaaaaatacaaaaaagggcagagagaaaagaacaggccgggcatggtgcctcgcacctgtggtcccagcactttgagaggctaaggcaggaggatcactggagcctgggaggtggaggctgcactactgcactccagcgggtgagtgagcgagaaaaaaagcagaaaggaaagaagaggtgcatgagtgtggaagagcaatatggagagaaagaagggagagaggattggaagtagcgacagaggaccatgcccctccagctgaggagggggcgcccctaagacagcgtcagcccagagaccggggcaggaagcaggaacgtgaagcaggttaggagccagtgtgaggcacggagagggccgggtagctgggcggcgggggtgtcgtgggcacagcccaggctactgcggggacaggctgccagacccggcgggtccaggttgggaactcggccatgcagcagaaacgttccctgcctcaacagggcgcagccaccccggggccatctctgtgacccagggagagaaaggacaacgaatgggactagacgaggatggggaggaacagagcagctgtggaaggtgcggcagagaagggcccaggagaaaggaggaagggaaggagctggaggggcgggagaacaggagacagaacaggacagagacagctgcccgggaggatgggagaacagaaagagggaggaaacgccgagcactgacctgggggaggggagtaaagagaagtgaagggggattggaagggaactggagaatgagagaagcaacaggcggggtgcgtgtaggagggcgggagagccaatgacaagacagaaaaggcagagaaagcaaagcaagaccagactcctcatccggtaacactgtgtcaggtcattgccctcccaccccgcccccaaccccataactgaaaacaagtaggaacctggataaaatagtcttaacaattttttttttgagacggagtcttgctgtgttgcccaagctagagtgcagtggcgcgatctcggctcactgcaaactccgcctcccgggtttaagcgattctcctgcctcagcctcccaagtagctgggattacaggggcccgccatcgtgcctgctaatttttgtattttttagtagagacggggtttcaccattttggctaggctggtctcgaattcctgacctcatgatccgcccaccttggcctcccaaagtgctgggattacaggcgttgagccaccgtggccggcccttaaaagcatcaaactacatacaagaccgtaaggaagctgtgggtcaacgcggagggacgtgggaacccatcccggtgaagcggcagcgtcacgtcctttctcccagggatctgttggtcggagacatctggactttcatgtggacagcctgagtgacagggggacccaggggcctcacctgggctacctggggtgggtggaccctccactgtgccaaggtgcagcctgggctcggaggaacatgccctccgcctagtccctgacatccttttcacatccaacacgcagagcaggggcgtgagggagcaggcaagcagggaagggaaagacaatgagcaagagccagcgggacggtggggcggatggcagaggcttcgctgctggaaaatcagacgcagagtacgaaacgcctgtgctcactatgttaataataataataaaaggcaaaaaaccaggctcattgatacactgatattaacaagaacaaagtactgagagagagagagagaggtgaggaggaaggcagaagagggaaggctggctttcctgccgtccactttgtgacctcctgcgtgatggcgcgtccttccaagtcatggggtaacgtccttgtggcccagataatgagctgcagacggacgggaatgtgcaactgtggagacacgcgagcttatggtcccaggacctggcaggacatgaaatgagtttcttaaagggtgaaacagattgcaggaccaatcgtcccgatcgtccaaggcaggataaaaatatcccagcatgcggaggagccctccctgcccagtctcctccgaggggcctcggggcctctgcagctgcagctgttggagtcatcaagaagacggggacgcgggagggggacagggaccaggaggcgaggggatggcgggagtcgggggtggggttgggcggggtggggagaaggctgtcagcgccaggctcagacgagccggtgggagcagagacgaggagagggaagggtcaaggacaatgactggcagaggaactggaaaggaaggagcgggcatggagaggcggagctgggaaggacttgggggactagaggcgaggggagagagcttgtggggtgagggagaaaacggagaggaaagagcgagtgaaggtgaggatggaaaggaaacaggaaagccccatggaggggaggatgggagaaatagagtgtgtcagagacagagagggagagagagatggcgagagatggagagagaaagagacagcgagagagacagagacgttgagagaaacagagatagcgagaaagagtgagagaaagagacagggagacagcaagagagacagtgagagagacagtaagagggagaccgagagagagagtgagagacagacagcgagagagagacagtaaaagagagatagccagagagagacagacaatgagacagaaagcgagagacagagagagacagtgagagaaacagacaaaatgatggcgagagagtgagaaagaaagagacagcgagagaaacagagacaatgatggcaagagagtgagagagacagagcgagagagacagagacggactgagaaaatgagacagagacagcgagagatgggagagacagggagagagagagagagagagagagagagagagagagagagagaagcgccaaagagaagccaccaggagcgtgtggaggggaagccaggtggaactcactgaaggtgcagggagaggaaggggaggcaggagtgagaggaaagaggagaggcaaatccaagggacagaaactggaggcaaaggaggcagaggagggagggagaccaagggcacaggccctaaccacagtgctgccccttgtccccggcccccttgtctccttctgacacagtcggttgctgtggacgggcacagtgagactggggccccatcagcgcctcctctgggggttgggtacagacgatgaggaaatgacagggcggggatgaggaggaggacctagcgcaggggaaggagagggcagaagacagtggggggtggcagtctggaggacaagggagaagattccagaaaggctgagagccacaaggtggacaatcaggaaaaggtggggctgggtggaagcgtgtggaggactggaatatcgcccaagggaggagcagtgtgtgcaagacctagagaggaggaaacactgaggatccagccgaagagaggacacacagggacagggacagcctgtgtgtgtgtgtgttatggatagggggaggaggaggggggagaggaaagaggaggaggagaaggaagaaggaggaagaggaaagaggaggaagggggaggaggaggaaagggggaggaggggtgaggaggaggaggaaagaggaggaggaaagaggaaggaggaggagggaggaagaagaggaaagagggagaggaggaggaaagggggaggaggggtgaggaggaggagggaggaggaagaggaaagagggaaaggaggaggaaggaggagggagtaagaggaaggaggaagaaggagaaggaaagatgaggaaggaggaaagaggaggaggtggagtaagagggaggaggaggttgcggtgagctgagatcgctccattgcactccagcctgggcgacagagcgagtccccatctcaaaaaaaaaaaaaaaaaaaaaaaaagggaatttgggggcatgcagagacaggaacagagtgggagcaggggttgggggagagattcagagaatgggagagaggagagggcgagagagacagaggaagggggtcacagaggagaggtagaaggagaatggggaggggcaaatcctctttcccgcccgagcctcagtttcctcatctgctccctcaggtggtgaggagtccagggaccacccgccaagtgtctgcagggcaggaaggcctgcggaggggagagggaggtggaggaaggaggctcaggcttgaatccagtgtggtgactggcagcagaagcgtcccctccatgggcacgggctgcctctcaggctcagattctagagtgttccttcctagagtccctccaggcctccttcagcctcccccaccccaccctgacctgggagggagtagccattgtcgtccacatatttttccaagggagaaatcaggctgcagcccacatcctccttcctcctcctctttcctgcagccccgcacggtgtagctggccaccccttctagggctgtggcggctgaggggaaaggaaggggctaaagagagtcgccttggtacacagttggcgctcaattggtgcccttcccctttcctaggggagagcacagagagtaggaaggcagagagaggaagagaaagggggaatcgagggtgagaaggggaggctgtatctataaaaagcctggcacacagtcggtgctcaataactgcccaggcccttcaggaccacatgaaaagggagaagaagaaagtcccgcagagcaaaagcagaaggagaggcagcctaaagagagggacatagagccaggcacggtggctcacgcctgtaatcccagcactttgggaggcctaggcaggtggattgcctgagctcaggagttcgagaccagcttgggcaacacggtgaaaccccgtctctactaaaatacaaaaaattagccgagcatgttggtgggtgcctgtaatcccagctactcaggaggctgagacaggagaatcgcttgaacccgggaggcagaggttgcagtgagctcagattgcccccctgcactccagcctgggcgacagagcaagactccatctcaaaaaaaaaaaaaaaaaaagagagagaggcacgggtggaaagtgtgaagcagaccagtaggtgtttgttaagtgttatttcttttccccaagagacaggagaaagtaaaggaggagtgaggagaggaggaagaggaggaagagaaggaggaagaggaggaggaaggagaagaggaggaagagaggaggaggaggaggaggaggaggaaactccagcagagagaatagaagagactgttgtgtgggaaggagacaatatatgtaaagtgactaatacacagtgggtgcctaataaatgcccattctcctccctggcagcaagcacagagaaagcagccaggaggaagggagcaagcggagagaaggagaaaaggagagaagggagaacagagcctgtgaggcaagcagacagtgtagatgaagcggcagcatacagtaggcactcaatacatgcctatttcctccctcaggaaagagctggcagggcagagaggagggggagaagctggtggagagaaggaggcagggagaagagaggaaatgagaacaagtacactggtgaggtggtgggcacacaggaggcactcaataaatgcacattgtcgtccttggaggagcaagagaacaagacagaaatgaaggcacagacaggaatgagaggaaaaggttggcccaggaggcctccgtgggggtggaggagcagagggaggagggatcagtgagaggagtgtggcagaggagaggatacgcagggagggggcattgcaggtaaaccatggggcacacaggaggcactcaataaacacctgtacccttccccagaaaaggacccagagaacagcaaggggataagctggcagagcaagaggggcagcgagaaagaggtaggagatgaggagggatgttaattgcctggcatacagtaggtgccccataattgcttgtctttgtccccgagaaagagccgatgggacagaaagaagttagagataagggaagaaggcgaagtgaagggttaggggagaataagaaaactgtctggcacacaataggtactcaataaatgcccattttcttccctggcacagagcagaaagaagcagagactggtggagtcagtggagactgaagggcaagaggagaggagagaaaggacataattgcttgcataccagaagtgctcaataaatgtagtccttgccttggaagagggcagagagctcagaaacacaaggaaaggacagaagagggaccggggaggaagagagtgaggagagaggtatgtaaggtgtttagtacacagtaagtgctcaaaatgtgtccactccctctgccaggagagagcagaaagtcagaaaggagaggacaccaatagagaggaaagaaaggggccaggcgccgtggctcatgtctgtaatcctagcactttgagaggcagaggtgggaggatcgcttgagcccaagagttcgagaccagcctggccaacgtagagagaccctgtctctacaaaaaatacaaaaattaggctgggtgcggtggctcattcctgtaattccagcactttgggagccaaggtgggtggatcacctgaggtcaggagttgaagaccagcctgaccaacatggtgaaaccccgtctctactaaaaatacttaaaaattatccaggcgtggtggcgggtgcctgtaatcccagctactcgggaggctgaggcaggagaatcgcttgaacccaggaggtggaggttgcaatgagctgagatcacgccattgcactccagcctgggcggcaagagcaaaactccatctcaaataataataataatacaaaaattagccaggaatggtggtgtgtggagttccagctacttgggaggctggggtgggaggactgcttgagcccaggaagtcgaggctgcagtgagctgcgattgtgtgcgctccaacctgagcgacggagtgagaccctgtcctagaaagaaaaaaagaaagaaaggaatgggggtggggggaggaaagaaggtagcgagagaggagccatgttcctcaactcctcggcgcatagcagatgctcagtagatgcccgtttccttcccaggagagaccaagcaaatcagaaagagaaaggaactggggcagaagggacaggaaagcaagaaggatggaaagtgcagacgcggttaggggaattgcctgccaagcatcaggtgcttaataattgcccgtttcttccatggaaggagccagaggcacaggaggaacaagtagagggcgccgaggacggcacacccgaggcgggcacacccgaggcgggcacacccgaggacggcacacccgtggcgggagacggagtgtgtgaggagaggcgaggaggcattttgggtgcatacagcaggtactccataaatgcctgtccccttccccaggcagagcagagaaagcaggctgggagtaggtggagaccccaggaagggaggccaggggagaaggagagtctgagggtggaggccgtgggccaggcccgcaggaggtgcaccttccccaacccagcagccgctgtggccgaccctcctccgtggcccagcccacaggcctccccagctggctggctcctccggagccctgacaagggcccattgtcctgggcctggcaccgcctggcctggcctggcctggagggggaggggaggctgtccagccctgaccggctcttgtcccctgtgtctgtttgtgtgtattggagtgggggcgctgtctggtctgtctgtctctgagtctctctgtgtctccctgtctctcacgtgctgtgtctctgtgacctgctgtctctctcatttctgagcttacggcccccatcttgtctctgtctcgctctgtctctctctgtctctttccgtgcctgtctctggttctctctctgcatccatctctgtctctgggagggaggagcccccacccccagctccagaattcccaccccctatacccaggatcagggctggggggccgagctgagaggcagaggagtgaggaaggaaagaaggaggcgcagaagggagagaggtgaggacagaaacagctttattcagcagggaccgcagaggccccggagggcttcgtccagggagctggggagagaggaggagtcagagacaggagagacagacagagatggagagaaatggggggagagacagagacagaaatgggggtagagacagagacagagagaaatggtgggagagaggcagagagaagtgggggacagtcagagatagaaatggggaagagacagagatagaagtgggggagaggcagagacagagagaagtagaggagagacagagatagaagtgggggagagacagagagaagtgggggagagacagagacagagaaatgggggagagacagagatagaggaagtggaggagagacagagagaagtgggggagagacagagacagagagaaatggagagacagagatagaagtgggggagacagagacagagaagtgggggagagacagagagaagtgggggagagacagagatagtgggggagacagagacagagaagtgggggagagagagatagaaatgggggagagacagaagtgggagagagacagagatagaaatggggagagacagagacagagagaagtgggggagagacagagatagaaatgggggagagagacagagagaagtgggggacagacagaggcagagaagtgggggagagtcagaaatagaaatgggggagagacagatagaaatggggagagacagagagaagtggggagagacagagagagaaatgggggagagacagagatagaagtgggggagaaacagagacagagagaagtgggggagagagagacagagaagtgggggagagtcagagatagaagtgggggagagacagagaagtgggggagaggcagagaaagaagtggaggagaggcagagacagaagatggggagagacagagatagaagaagacagagagaaagagacacagagatacaaagccagggagagacagagagatggggagaaaagggagagtaagaaagagaaacagggggtgctgagggagactgagagaaagttggggggaggagacagagacacagaaaagaggtgggaggaagagacagatgagacagatggagagacagagagaaacagacgagaaggaggagagagagatggagagaacgatagggagaatgagagacagagacagtgaggagagggagatgaggcaggagaggagataaagagaactggggagagggacacagagaaagacagatggggagagagacagagacagggagaaagagaaggagagagagacggagagagagaggagagagggagacagcgggaaagagggggagagagagagacggagagagggagacggagagagagagacagagggagagagaaagagggagagagagagtgggagagagagacagagggagagagggagagggagagagaaagagggagagagagagagagggagagagagacagagggagagacggagaaagagagggagagagagacggagagagagagacagggagagagagacagagggagacagggagagagagacacagggagagagagagagagggagagagagagacggagagggagagacggagagagagacagagggagagagagacagagagagggagagagaaggagagagagagagagagggagacagagacagagagagacagagggagagagggagaaagagagagagggagagagagagacggagagagacagagggagagagggagagagagagacggagagagagagacggagagagggagagagagagacggagagagagacagagggagacggagagagagagacggagagagggagagagagacggagagagagacagagggagacggagagagagacagggagagagagagacggagagagagagacagagggagagagggagacagagggagagacagggagagagagagacagagggagagagagagacaggaagagagagacagagggagagagggagacagagggagagacagggagagagagagacagagggagagagagagacagagggagagagagacagggagagagagacagagagagagagggagacagagacggagagagagacagagggagagagggagaaagagagggagagagagacggagagagagagacagagggagacagagagagagacagagggagagagagagagagggagagagagacagagggagagacggagaaagagagggagagagagacggagagagagagacagggagagagagacagggagagagagacagagggagacagggagagagagacacagggagagagagacagagggagagagagagacggagagagagagacggagagagagacagagggagagagagacagagagagggagagagaaggagagagagagagagggagagagagacggagagagacagagggagagagggagagagagagacggagagagagagacggagagagggagagagagagacggagagagagagacagagggagacggagagagagacggagagagagagatggagagagagagacagagggagagacagggagagagagagacagagggagagagggtgacagagggagagggagacagagggagagagagacagagagagagagagggagacagagacggagagagagacagagggagagagggagaaagagagagagagatggagagagagagacagagggagacggagagagagacagagggagagagagagacggagagagagacagggagagagagagacagagggagagagggagacagagggagagagagacagggagagagggagacggagagagagagggagagagagacggagggagacagcgagagaagacgcgcggagccttgcggcaggaggtcgaggaaagaacagcccctctcacctggcgtcggtggcagctgaaccctgggcccgactgtgcgatttaaggggtgccctgggggtgagaccgcccccccacccaactgccttatctggccagacccggctctgtgagctaaatcgggcagcagctgtcaccaccagggggtgtgggacagctgtccccctccccccgcacctgccctgcgcctgcctcttgaccacagcccctccctctccctttctgcagcctgggggtgtggagaggccactggcatctgtgcggggcgccccagccccctcagctctgggacaggcctggccgggtgccctggggcaagcggtagccctctgagtcctgaggcgctcccctgggaagagcagtcccagcgggtgggggcacaggcgctctgcactgtgaggggcagacagtaagtgcttagttgatgcaatgacctggtctgtcctgcccgctctcacctgccagaatatgggggttggggcaggagggagtgggagcaggaggaggtcagctggcccctctccccccacccccagcgcccccagctcctcctcccggggctcctcactccggaccttatttggccatagcccaggacgcacctgggggccacagccccgcctgccactcaggcccaagaatagcaacactcaggcccccgccagtctgtctgggacctgcgatgggacaggcgacaggcacagggtggcagggaggggcccaggggcactgagagaaggggagagacacagacagaggggagagacagcgagctgaggagagactgagagagaccgtgggagagacagagagacagggtcaaagagacagagaggggtggagagaaatgcccagcaagagagatagagaagggaggctgagacaggcgaagcgagagagggagacacagagacagagggggttagccaggggcccggggccagacacccagatggggcagagagcgagacccacaccagcagaggcgtggggagcccggtgggcgggcaggaggtgcagggatctggatgggatggggccagagccgttcgggagtctgcaacccccagcagtttcccctccggtgctgtctggcttttaactttacgacctgccctttgaccttgggaaaacttgcaaaccagaacctgccacaccctggtccatgcgcagccagggctttcatgagtgtgtcctgcggggcatcagctccaccttgccaggggtgcatgggcagcttgtgggctgcctggatgaactgcctgcctgggcgcatgggcctgtggctccaggaggggacacaccccaagccagggaccccttgcctccctgtgcctgagtcccccacttctgcaggtgcctaacggggatccccaggttcatccaggcccctggacaccttccactcattcctgcctcctcacctcccagggcccaccagcctcagaccctcctctctgtcgccctcaggggcctagctcaagccctgcctcgcccctcccagcctcctcccgggcctcctggcttctggttccccctccattctgtgcctgcagccccagaggggtctctgcacccagagctgacctgtccttcccttctcgcagctcccaggctgcccttggaggtcccgcctggttgggttcctggccgggacccaccctcctccttcatcacctcctcaaataactctggcgataaacagccgtggcgttccaggtctcatccgggatgacttccaattctggagtgccctcccgtgccccgccagcctctgcagagccctcctcagccttccgtggccagccttgtctctgggccattttatgcgacttgcttgtcccggggtcccttctctgttctctcgtccctgcagtgctctgtgggaaccccataaaagcccccactgctgggacagaaactcttggtgtccccttgggtctccccacagggtgggagctgggagggtgggccgacacttcccgtcagcacaggcgtccctcctccgctgtggggaccctcgtgatgacccggggcccaccgggggatccaggacactctccctgtcccagtcccactcgcaacctcactctcccttggccaagtaacacaacatattcacaggctccagggattaggacaaggcatcttttaactgtatttattttaattaatttttttttttgaaatggagtttcactcttgttgctgaggctggagttcaatggcgcgatctcagttcactgcaacctccgcctcctgggttcaagcgattctcctgtctcagcctcccaggtagctgggattacaggtacctgccaccatgcctggctaattttttttttttttgagacggtgtctcactctgtcacccagactggagtgcagttggtgcgatctcggctcactgcaacctccgccttgcaggttcaagcaattctcctgcctcagtctcctgagtagctgggattacaggcatgtgccaccacacctggctaatttttgtaattttagtagagatggggttttcaccatgttggccaggatggtctcaatctctttaccttgtgatccacccacctcagcctcccaaagtgctaggattataagcgtgagccactgcacctggcctaattttttgtttgtttgtttgagatggagcctcactctgtcacccaggctggagtgcagtggcacgatctccactcactgcaagctccgccttctggattcacgccattctgcgtcagcctccccagtagctgagactacaggcgcctgccaccatgcctggctaatttttttgtatttttagtagagacggggtttcaccgtgttagccaggatggtctcagtcttctgacctcatgatccgcccgcctcggcctcccaaagtgctgagattacaggcgtgagccaccgtgcctggtctattatatttatttttatttatttttttgagacagggtctcactctgtcacccagggtggagtgcagtgattcgatcatgggtcactacagcctcgacctcctgagctcaagtgatcctcctgcttttgcctcccaaagtgctagggttacaggtgtgagccaccatgcctgggctattatattttgagacaaagtctctcttactcacgatcatggctaactgcagccttaacctcctgggctcaagcagtccttctgcctcagcttcccaagtagctgtgattacaggcgcaggccaccacgtcccacttatttatttatttatgagacagagtcttcctctgttgccaaagctggagtgcagtggtgcaatctcggctcaccaaaacctccacctcctgggttcaagtgattctcctgcttcagcctcccgagcagctggaattacaggcgtgcaccaccacacctggctaatttttgtaattttagtagagatggggttttcaccatgttggccaggctggtctcgatccctttacctcgtgatccacccacctcggcctcccaaagtactgggattataggcgtgagccacggcacctggcctattattattattattattatttttgagacggagtttcactctgtcacctaggctggagtgcagtggcacgatcttggttcactgcaagctctgccttctggattcacgccattctcctgcctcagcctccccagtagctgaaactacaggtgcccaccaccacgcccagcgaatttttttgtatttttagtagagacggggtttcaccatgttagccaggatggtctcaatctcctgacctcgcgatctgcccgccttggcctcccaaagtgctgggattacaggcgtgagccaccgtgcctggtctattatatttatttttatttatttttttgagacagggtctcactctgtcacccagggtggagtgcagtgattcgatcatggcttactacagcctcgacctcctggcctcaagtgatcctcctgcctccaccccccaagtagctgggatcacaggtgtgcaccaccatgcttagcttattttaaaattttttgtagagacggggtctcactatgttgcccaggctggtttcaaactcctgagctcaagtgatactcctgcttttgcctcccaaagtgctagggttacaggtgtaagccaccatgcctgggctattatatttttgagacaagatctctcttactcacgatcatggctaactgcagccttaacctcctgggctcaagcaatcctcctgcctcagcttcccaagtagctgcgattataggtgctggccaccatgtcccgcttatttatttatgagacagagtcttcctctgttgccgaggctgaagtgcagtggtgcgatcttggctcaccaaaacctccatctcctgggttcaagcgattctcctgcctcagcctcctgagtagctgggattacaggcacccgccactacaaccagctaatttttgtatttttagtggagatggggtttcaccatgttggccaggctggtcttgaactctttttttttttttttttgagacagagtctcgctctgttgcccaggctggagtgcagtggcacaatgttggctcactgcaagctctgcctcccggattcatgccattctcctgcctcagcctcccaagtagctgggactacaggtgcccgccaccatgcctggctaatttttttgtatttttagtagagacggggtttcaccgtgttagccaggatggtctcgatctcctgacctcgtgatctgcctgcctcagcctcccaaagtgttgggattacagccatgagccaccgcgcctggccagtcttgaactcttgacctcgggtgatctacccgcctcggccttccagagtgctgagattacaggcgtgagccaccagcctcacatgccacttattttaattttttttttttttagagacagggtcttgctatgttgcccaggctggtctcatacttgtggacctcagcctcccaaagcactgtgattacaggcatgaggcaccacatctggccagggtgtggacatctttggggccactgttctgcccgcctgccaatcaacggaatagaatcgagagtcaagaagtaaactcaggcatggtggctcacacctataatcccagcactttgggaagcagaggcaggcagattgcttgaggtcaggagttcaagaccagcctgggcaacaaagcgagatcccatctctacaaaaaaatttaaagaaagtagtcaggtatggtggcatgcacccgtggtcccagctacttgggaggctgaggtgggagggtcgcttgagcccaggagttcaaggctacagtgagctgtgattgacccactgcactccagcctgggtgacagagtgagacccctgtctcaatcaatcaatcaaataaagaagtaaacacctgctttctccttagcaatgacccccgtggaacccaggagatcaaactcatttgtttgccactggtctctctccagcaccggaggagcgtgagccccagggggcacggacttgtgtttttttctgctgtgtcactgatgaggaaactgaggcccagcagtgagaaactggcatgaggtggcagagaaccaggaggcctcctgggctctcggccccacacaccagggtgtctggcctgtaaggtaagtgggagtcactgagtggaaggggccccagaagggtggggccgtcagacacaggccaggcaggcagcaaatcagcagatttattgaggcagcagcggcagtggggagcaggggtgtggggagggggcggggcctccccagggtccatgaagtgctggcctttcccaggcatgcagtgtgcgcagccggagggggatgcgcagggactgcgctgtgggcgccgatggtcagccatggtcagtctgtccgcagccagctgcccttctcctccacctccttggtcactaccagcagcacctcgcacaggccctgggccagcgcagccgccaggaaggccctgggtgggagaaatggggagactgaggctcggccagcctgggcattccgtctggggagtggggtttcaggcccctggtcttggaatcgcctctgtggggctcacctgactccgtcctcatcccccagggcctcgggcgcccgcagcttggagtccaggttgtagtagacaccgtccacctggcgcagggccacccagtgccgccggcgcagcggcagtgacagcagccccagcgacacgggcgagggcaggttcaggatcagccccagtacctggggcagggccagctgggacaggggcctgtgtgggcagggaggggacactgccatcagggcctgctccgcccgccggtgaaatgttgctgaacatgtggggcccaggctggtggtggtgagggcctcctgagcccacccagaggtgttccttaatcagccaccctggttcccgacactcatccgttcacctgcccactcaaacctcccacccatgcggccacccaaccagacctcccacccacccacccaccgtccacccacccacccaccgtccacccaactcacatcggcccttcaccaaccaccatcaccctgtctgtccagccacccacccaccaacttaccaactcctcacacagccacccaggatccatgcatgatccgcccaccccactgagcctcccagccaccagccaacttcccaatgacgattcacacactcacctcccatctatgcattcacttccatccctcatatacacccgccccacctccccgtcaaccacccaaccaccatcaccatccaactagccatctactgttcaccacccaccacccacccacccacccacacagccggccaccacccagccagccattcacccaacagtggactcgccatgcccccaatcctcactcactcttgacccccctgccattggtctacccctcatccaccagccacatgcccagccactggccagccggccatcaaaacttcccattcatccacccaactccccagcctcctgtctgctgcccattgcccaggaacacccatcacttcactccccctgacccaacacatccaacggcctactcagcattcacccagtaaccatcatccacccagcatctcagcccatcgaccacctgatctccccctttcaacccatcagtgccaggcttcccacattcatgccaacctcccccagccacattcccctccctgccccccaacaggctcacactatagggtgccctctgtgcccggcccagcacatgctgtgctgctctggggcctacctcctcctgtcccaccacacggcggccaggcccagcccctgcagagcggccatgatcacattgacatcatagttgccggtgcccaggaggctgcgatgagggttcagccgggagtctggggccaacctggtagtgggggtggccagagctgaggtggggacccctggaaaggcctccccacaaaatgggggtcccaggggccacaagttgcctcagcctttgactctccccgcttcagaccccacaactcatccacccccaagtcctgcctctcctgccccaattctgccctgtccccaagtcctgtctctcctgccctgactctgccctgtccccaagtcctgcctctcctgccccgactctgccctgtccccaagtcctgcctctcctgccccaactctgccctgtccccaagtcctgtctctcctgccctgactctgccctgtccccaagtcctgtctctcctgccctgactctgccctgtccccaaggccccagatgggctctgtcttctcccgcagcctccagcctccctccagtccattcccacacggccctggccctctcctgctctcagctctcccatggctccccaatgccttggacaaagtccctgtccctccgccagtcccttcctctgtccttcaaggcccacctcagatgtcacgtcctctgagaggagcctcctgacctccaggctggatcggggccctgtctgggctcccccagtgaactgagccacctcaacgatgacagctgcccgcatcaccctgatttaacactgcttgcttctcccacggggttgccctcacccctcccctgctcacagcccactctgctgcctcatttcccccaggacagagtcccacaaggccctgcgtggtctggctctggtggcctcacctcagagcctcagcaccctccttcctggtcccctgtccccagccacatccccggtgcccaccgcctcccgccccacccccgccaacctttcctccagctcttcccctgcctaggaaggctcttccgcctgtcaccacttgtctctgggccctgcctctgaacagctgcacctctgttccctatctggaccctgggcaggcaggacatgggaggaaaacgctcgtgtgtgtgtgtgtgtgtgtgtgtgtgtgtgtgtgtgtgtgtttccctcaccacccttaggctggcacttgtgtctgagtcatctcagggtctccagcatggcttttgtatgaaagagctgatgggtccttgttgcgaatgatagaggagatgactaaataccataataatcagtctgaggggctgggactcttaagatgtccgagagccggaggaggcttggagcaagaggcaggggaggcagggccatctccaggtgtagaaagactctctaggatcaagtggggactgaaggcagggacagactggaggccatgggcaggctgggcaggagagggtcaggcctgagctggggccagggacatggggacagagaggagggagtgagagatggtaaaggagtgattttttttttttttttttttgagacagtcttgctctgttgcccggctcactgaaacctctgtctcccagcttcaagcaattctcccaccttagcctccagagtagctgggactacagacatgtgccaccacgcccagctaattttattttttatttatttttattttttagtagagacggggtttcgccctgttggccaggctggtctggaattcctgacctcaagtgatccacccgcctcagcctcccaaagtgttgggattacaggtgtgagccactgcgcccggccaaagagtgatgttggacattgtgaatagtgaagaggaacattccatgctggcagagaaggaagccatgccgggcagaaagaagtacctggaagcccagaggccgcacagaagggctcacgggagtggagagtctggtttgaggggggccgtgagggctgaagatgcggaggcaggctcggcctccgctatgaggagggccctgagtagggcgggggcgtgtttaggatggactggagagctgtgacagggcccagataagagatgcctgaagctgggtgagcctgtaatcccagctactggggaggctgaggtgggaggatcacttaagctcaggagttcaagaccagccagaccttgtctctaaagaaagaaccactgggccgggtgcagtggctcacgcctgtaatcctagcactttgggaggccgaggcgggtggatcacgaggtcaggagattgagaccatcccggctaacatggtgaaaccccgtctctactaaaaatacaaaaaattagccgggcgtggtggcgggtgcctgtagtcccagctactcgggaggctgaggcaggagaatggcatgaacccgggaggccgagctcgcagtgagcgagatcgcgcaactgcactccagcctgggcaacagagtgagactcagtctcaaaaaaaaaaaaaaaagaaagaaccactggattgaggtctggctggggctgaggccacagggacagacaggcacaggaggcaacatctccccagagtcccagcgtctagcttaggcaagtgagcgcggagcagaagaaagcccccaaggctcagcgcctgcctggcggcgagacccaggtgggtcactccgccagagctctgctgctccaggggctggggtgggtgacggtcacctcttgcagatctcatcggcagcctcctggctaaagagctgctgctgcagaacgttgttgagggcgtggacagcacacagctccaggcgctgccgttcgtggtacacggtgggtgggctcggctgtgctcccggggcctgggacatgccgtcctcggctcctgctgggggttgggagggggagaaggtcctcaggggcccgggatctagaggtccagcctcccagcaggcctttggggcatcgccattgattgagctgggactcggagcagcccaggaagacactgggcccctgaccccgctccctggcagtctcctggcagcacacgtccctccatcccttattcctattcctacgaaaaacgctgtctcttctgctcccctagcaacagaaaaccaccctcaccaggtctctaagtaaaagggtccctatcatggtcacctagcaacagaggaacctgcctccccgtccctaggtaaccagggcgctctgtggttacctagcaacaaagccccctccccaccgcactaggtaacaaagtctgtcctccgagcacctagcaatagagaatcctcctcccctgtctctaggtgatagggtcccctctggtctcctagcaacagaagactccccttccccggtcatgtagcagcgaggctctctgctcttgtcacctggcaacggggccccctccccagtcactaagcaacaggagttcctcttcctatcacccagcaaccaggccccctccccggacaccaaggaatggagcccttcgccgacccgcaccccagccacggcgctcgccctttgcctggcaacgcccctcaccccgcctgcctctccgctccaccgagccaggggtttccgcatccccttcctgggcggcggctctgggctccgagtgcggggcgggcaacaccgcgctgactgggcaggcgggacggactacagctcccggtgatccccgcgcgccggactacgactcccgtggggccccgcgggactcctgctccacacggaacgcccgggccgcgtggccctgaagtcggccgtcgggcctaggaaatgccgcactacaacttccgtcgggctccgcggcaggtcccggaagtgcgcctcagaggcccttctttcgcatacggccgcgcccactactgctcagagattctaggaaacttagtaggtaggctctcgcgatagcttcctggcgccgcgctctcatgggtgctcgcccccggcgatggcgtcatgcgcggtgcgcagacgcagcgtgacgtcacacaagggaaagggatcagagacgccaggcggtgcggggggaggcagcggtgatctttactgagtcagaagggagaccctggggaagtggggcagggcaggggtgggatggtggtggtgagaggccaggcagatgatcttgtctcgggagggaggaggcttctcagcagagatggatccccggcctggaggggagctggcagcaggctgcggggagaggggaatgagcgaatgagacagaggagagatgaggagacagacgcctgggggaggcagtggtgggaggaggggacagggcaggggggcggtggaggaagacccggagagagcgggacagagccctgggggtggacagagacagagagagtctcgatcagaggcgggcacaaatggagacatctacagtgccaggattcaaagtcatggagagaggttaaggaaataaaggtcagaaagaaagaaaggtcaacaaatacagaaccagaactgcagaactagtgagagcccgggacccccaagctctgcagaacacaggagcccagggccgggggagaggggcctggccgcacccaggaggctctgccagaaggccgtgacggtggcggagccggtgaccgcgcctggctcggcagggttctctctgcgggtgtgcacagcaaagcttcggcccgtggggccccggggtccgctcagctctacatccaccacgtgcatgtccgtgaggctgggacaagaggggcagtcagtctggagagcctggactcagcccaacaccctgcttagctctgctcacctggtatcagccacgagcaccccaatcaccccatcgaagcccaggctgggggcagccagggcagccgccgccatggtgttggaatttcgcggggcaaaggggcagagcccacggacagggccttcgtagagcacagtgcaaggcccagggctgtgggctgcagccaggggtccctcaagccggaagccatcggggtgtgtggccatggtgacacgaaggctctggaagcaagagcccgggttagggggagtggggtctttgcaggcctcccctggttcctggggagcccagcaggcctcacccggaggcccccagctgcatccaatctcctgatgtcctcagcgccccacagggcccctcgggccacaaacacggcgtggtcccagtgctgtgaggcctccaagagctgccgctctgtggtctggtcacttagagctgagggggaccccacctggggtggatgaaggaggggagggttgaggtcagggaaggatatccacttcagggtggggtgagaccaagacagaaggggcagggctctgcgtaaatggttggggtggggcttaccaggagattggcatggcgcaggatttgtgccccagattcatggattattttgggatgggccacttccacaaccagatcagggcgcctgggagaggggaaagagggcggagggtcttggagaggtattaggcctcttctccccaaggttccctccgagtctactgagggctgcccttcttctccctgacctgggaggcgaaatgagatgaatgggttcgtcctgtttcacatttgcttgaaccaaggcccagagagggtcagggaacccctgagatcacacagtggctaagagagccaggacaggagcttcagggagctccactctcccatggcaaggtcactgacctttccccaagggcagcaaggttctggagctgcagggaagggggcacgctccctgccattcgtcctgggtcacgattccagacaaaaacaagttctaggccaagttctggtccctgagccaagaggcgggagacgagggactgtcctggggagagggaaaggagagggctagagatccagagagagggggacagagacccagagagagaggaggtggggacagagacccagagagagaggaggtggggacagactcagattgcggggtagggagacagagatgggggcagggcagagacacagtggggtggacagaggcccagagagaagggagacagagacggagaggacagagacctggggtgggggtgcagtgggcagacccagagacacagccaggggcagatagagagagaaaaaagtgtttgtggagggcagagagtcttgggagctttaggaaggggtttggggaaggaggccaaggatggtcagggactcaccgaggcggccatagcccaccacgcccaccctccacgggcccctgtcggccatggccctgagtgcggtgtctggggcctggctccctgggctgctcgctgcccgctgcacaaggcctgggcagccgctgctctttggacatctgacccttgagcctctgggctcagtcttcccccttccccgcaggcccagcgtgggggcgtgggcctgcgggagtggaggcgggagaacccttccctgtgctctgtccactttcccgggtccagcacagtgagcatggtgaccgggggttctgggaaccctgcgtgcccccctttcccctgcagcacaccctctttctccctgctgatgtggaaagtttcctctgcagtcccctgccccctctctggccggccaggttgtcatggaaactgcatcttgctttgggttgggagaagagatggtgacagggactctgggctctgtctgtcccctcgtgctcacctctcctccttgtcctcaggcggctaaggtctgagggaggcttcagcctggccgtggccctagccctcccagaggcagcgggagccctggttgtggcttctcctcaatgtgcccttgcctcagcgggtccaacctccctagccccgctgcgcagcacgggtccccttcccacagcctccgcccctgtccacagcctccctccgctctgatcatccttcagttcaccttgacttgctacctttcactctgtcccccatcgtgccaccagctgcctccagtgtgacgttctcgctcccacgtccgtccctcccgttccccagctcgcgtcagcccaggagaagccttcgaggcctggagaggccaagtgcccccaacatgagccccagcctctgtgccttgagggtgcctggcatcggaaatggcgcaggctgcggcagcgcaggctccctgcccccagccaccacctggtacccgctgcagtgtttccatggcaaccaggattggcgctggaaggaggctggagagaaagagagcgtgaacgggagcatggggtggggggggcgggcactgggtggcgagagccccaagttgacgggaggagagaggagacagacgcgggcagacagagaggggccaagaccccgacgtggcacccaaaggctgccgctgctgataagggaggaattggcttccagagccaggagcccccggtgtgggagagatgagatgcctgggtgtagacagagccaggaagggggcaggggccaggcacctcacggaagtggggggcctcccgccatctctaccttctgactcctgctggggcctgagtgtccccatagtgcccatagctgccgtgtacggggtacagcctgggccactacgaggggagaagggggctgggcgcaggcctgtgtgtcctcagggctgtgtccccgaagccacctcagcgtgggaaagcactggaaggccctgcatggctccgtccctccctctgcctcccccagcagcgtgagatggcagccctggccagccccagccctccagggcctgcaactcgggcaccttgaccccccaagagacatcaccaccccctcccccaacccacccaacagctgcccactgtgccagcaaccccccagccaggcccgctcagggtttgctccctgccctcccagggctctgctcctgcccttctgagtggcactgtggtgcccctgccgccccaggcccacccgatccggccctccagcctcccactgaaccggccagaaatacagctgctgtgccccagaggccgcaggcccagcctcccgcttggcctccctccccttcggcaccccgtcctctggagcagccttgagggggtctgcagtggagagacacactctggattgggccctgttgtgggttgaattgtcacccagaaagggaagcgcagaagtcctgacctccagggcctcagaatgggaccttatttgggaattgggtttttgccaaggatggagctgaggttatactggaggtggaggctcctggtccagtctgacctctgtccttgtaagaggggaggttaggcaggctgcagtggcccacacctatagtcccgacactttgggaggctgaggcaggtggatcacttgaggtcagaagttcgagaccagcctggccaacatggtgaaaccccgtctctactaaaaatacaaaaattagctgggtgtggtggtagtcgcgtgtaatcctagctactcagggggctgagggaggagattcgcttgaacctgggaggcagaggcttcagtgagctgaaattgtgccactgcactccagcctggacaacagagcaagactctgtctcaaaaacaaagaaacaaacaaagaaaacggtcaggcgcggtggctcatgcctgtaatccgagcactttgagaggctgaggtgagtggatcacctgaggttaggagttcgaaaccagcctggccaatgtggtgaaaccccatctctactaaaaatacaaaaattagccaggcctggtggcgcatgcctgtgatcccagttacttgggaggctgaggcaggagaatcacttgaagctgggaagcagaggttgcagtgagctgagatcacaccattgcactccagcctgggcgacaagaataaaactccatctcaattaaaaaataaataaataaaagagggggagttggacacagacggacgcacacagagggaagagatgagaggctacaggggcaggcactggaagactggggtgatgtgatacagccaccagccaggacagcctggggacaccagaagctggcgaggcaggaagctcccctgaggtatccccaggtttcagagagagcgtggccctccctccagcctccagaactgtgggacgatagatttcctttgttataagtctccacctgggtttgggtgtggtgtggcggtgctgggggaggagtttaggaagaaagggaatcagaccttctctggggtctccagggtgaaggctgaggggcctaagaccacccggaggtgccccgtgcccaccctcccgacggagctgcgaggctggctctccagcctctccttccgcccccacccacattcactttgttttctctcctccgtgctttcatgaccaaaaaaaatatttttttactttttccatgttttttttttaaagtaattacagagcaggtagtcgttgacgcaaacctcccttcagtatcaaaagtgtctgtggggcaggtggggctggggcgggtggaggctcccccccgcgccgacgacagggaccgccggccgggagcagagccgggcgctgggacgggagctctggcgacgtgtccatctcttcagttttgagggcggaggagtgggagggagggacgggcgtcaaactgcaaaaactgaaccgtaaaaggaaggtgtttggggccgaggggaaaggacacccctggagaaagctcctctctcccctggaaggcggcgggcccggaacgcttggtgggagagcgaggaggaaacgcggagaactcaggccacttctcctgggtcccacgtcccctcccgtcaccggggattggcgggggtgaggcgaggatcccagagactccgctcctggagccccaccctgtccttactgggggtccgagccccagatggggctggaagccacctctccccaattccctgcgtggtcccagaaggtgggctgggctgtgggagggaggggtcccggtcaggctgcgcccgggctgggacctgggtggggggctccacgcccctcgcccgcccggccccgccgcctcagatctgcgtctcttgcacgttctccttggagccgctcttgaagagcagaggttcgtggatggagttgaggccaggcgggcctttgcccccgcagcccccgccgctggggttgctgctgtagtgcgccttgaaggcggcagccacgtagtggtggtggttgaggtggtctcgctccagggcgggcagggccaggtggctgtccccgcccacaccacccccactggccacggcggccgcggcggccacggacacggccgaggcggcgggcagctcgtcctccacgttgatgatctccacggtgcgcgtgggcccgtggtgcttgtggagctggtgctgcttgcgcagcttgtagaaggccacgagcatcaccgcggccatgaacgtgatggccacgaagcagccgatgatgattttggtggtcttcatgacgtcgtccaggtccttgagggcgttctccgtcacatccgtgatgggcaccgtgaacgccttctccgtgggccgcgaggagcgcggggcgggtgccgtggtagaagacgaggcagggccggccgcgtccccaggccggcccccaccccagacaccgtctgtcgtgggccctggcggttccttctccgtcccccgcggctgcagggcctcctctccgggctgcgtctccagggtctccacggtcaccgtggtgaagtaggtgtagccgccactgccccctccaacaccaccactgcccccagggccgcccccgccgctgccggtgcccccggccgccacggggtccacggccgagacgttgagcgtggccgaggcggtggtgttgccggctgagttcgtcaccatgcacgtgtactggcccgtgtcctgcacggtgacgttggtgaagttaagcgtgccgtcatgcaggacggagatgcgcacgcggtaggagccgtgggtcatgagggtgccgttgggcgtcagccagttgacggaggtcatggaggtgcccgtgcggcatttgagctcggcagccatgccctcggtgacgttgaggtccgtgggcggctccacgatgacgggcgcatagcaggtgaaatgcgactggtccagctccccaatgtagcgccccttgaggccggcgggcgcatgacagcgggcgcagcacgtcgtgttgctgggcaccgtctccttgagccaccagctcagccagagcacgtcgcagttgcaatgccaggggttgtggttgaggtgcacgcgctcgaggcggtgcaggggcgtgaagaggtcgtggggcagcgacatcaggttgttgtgggacaggttgagctcctccagcgacttgaggtcgtcgaaggcgttgcgctcgatggtggctacctgggcgtgcatgagccacagcttgcgcaggctggtgagaccctggaaggagcccgggcggatcaggtccagccggttgcccgacagctccagctcctccaggcgcaccagggccgtcaggttggggatgtccttgaggttgcacatgcccaggttgaggtagcgcaggttgaccagcccctcgaaggccgcctccgagatgtattccagccgcttgagctcgcccaggtccaggcgccgcagcgagggcacgcggttgaaggcgtaggaggggatgctctcgatggggttgttccgcagccagagctcccgcagcttggacaggtactcgaaggcctgcgtgggcaccgtggtcagccggttgtcaaaaagctccagcgtgttgaggctgggcagcccgttgaaggcgcccacctcgatcttgcgcaccaggttcttgctcagctgcagaatctccaggtgccgcaggtgcttgaacgtgtccgtccggatcacctggggagagggagacacggatcagtcacggagatactgacggggaccgtggggggatcaccaaggtcccgggcgcaggtggggccgtgtggctggatctcccgtgctgtgctgtgacggtacgacctatattgcaacatggtttgatgagtttcttataaagttaaaactggagtcaaggctgggtgtggtggctcacgcctgtaatctcagcactttgggaggccgaggcaggtggatcacttgaggtcaggagtttgagaccagcctggacaacatggtgaaaccctgtctctactaaaaatacaaaaattagccaggtgtggtggtgcgtgtaatcccagctactcgggaggctgaggcacgagaatcacttgaacccaggaggcggagtctgcagtgagtcgagatagtgccactgcactcctgcctgggcaacagagcaagactccatgtagaaacaaacaaaaaaactggattcaagaattttgggggaccaagcacaggggtggctcatgcctgtaatcccagcactttgggaggctgaggtgggcagatcacttgaacccaggagatcaagatcagactgggcatcagaacatagaccccatctctacaaaaataaaataaaataaaataaattagccaggcgtggtggcatgtgcctgttgtcccagctactagggaggctgaggtgggaggattgcgtgagcctggaaagtgaaggctgcagtgagccctgatcacgccactgcactccagcctgggcaatgaagtaataccctgtcaaaaaaaaaaaaaaaaaaaaaaaaaaaaaaaaaaaaaaaaaaaagaagaaaagaaaagaaaaatgaacaaacaagaaaatgaaaaaaagagaaaaaaagatagttacttagaaagttaaaactggagtcaagaattttggggacggccaggcatggtggctaatgcctgtaatgccagcactttgggaggctgcagtgggtggatcacctgaggtcaggagttcgagaccagcctggccaacatggtgaaaccccgtctctactaaaaatacaaaaattagccaggcgtggtggcacatgcctgtaatcccagctacttgggaggctgaggcagaagaatcacttgaacctgggaggcagaggttgcagtgaactgagattgtgtcaccacactccagcctgggtgacagagtgagactccgtctcgaaaaaaaaaaaaaagaattttgggggccaggcacagtggcttatgcctgtaatcccagcactttgggaggccaaggtgagaggatcacctgagcgcagaagcttgagaccagtctgggcaacattgggagaccctgtctctacaaaaagaatttaaaaagaaatataaaaccaagaattttgggattgaagaggaaaaaacttttgaaaaaaaagttaaaactggagtggccatccgacccggctgttccattcctgggtatttcctcaagagaaatgaaggcagatgtccacgcaacggcttctatgtgggtgttcacagcatttttttctcaggactgcctaagctggagacatcccaaatgttcctcagcaggtgaatggacaaacactgcgaggtgtggccgtgtaaaggatgctgcggctcagccatgaaagggacctggctgctgtgaccccctggatgaatctctcagctcagccatgaaagggacctggctactgatgaccctctggatgaatctctagggggttacactgagcaaaagacgccgaacacaaaggagccggtgcggtggatccgtccacaccatgctctgggtgttctaagtgtgcgtctctgcgtgtgtgggcaggtgaggtatctggggcagacagggaagggcatgagagagctttctggggtgattgaaaggtgctacattggcgtggtggttacatgacggaaagcgactgttaggactccccaaactacacttaaaatgaggatattttattccatgccagtgatacattattttattttattttatttttgagacagagtcttgctctgtcacccaggctggagtgcagttgcacaatctcggctcactgtaacctccgccttccaggttctagcgattctcctgcctcagtctcccaagtagctgggattacagggtcgtgccaccacgcctggctaatttttgtatttttagtagagatggggtttcaccatgttggccaggctggtcttgaactcctgacctcgtgatccacccgcctcagcctcccaaagtgctgggattacaggcgtgagccaccgtgcccagccaattttgtatttttagtagagacggggtttccccatgttggccagactgttcttgaactcccaatctgaagtgatctgcctgccttggcctcccaaagtgctgggaaattacaggcgtgaaccaccgtgcccggccactatacatagttttaaaaatgaaaaaaataaggctgggcatggtggctcacagcagtaatcccagcactttgggaggccgaggtgggaggatcacttgagctcgggaattgaagacaatcctggtcaacaaagcaagacccctgtctctacagacaaatacgaaaattagccctgtgtgatggcatgcacctgtggtcccagctactcagaaggctaagatgggaggatcgcctgagcccaggaggccaaggctgcagtgaactgtgatcgtgccactgagctccagcctgcgtgacagagggagatcccgtccccaaaataaataaataaatatacaaaatgaaaatagtaataccagcaactaagacacattgaacacatctttggtgccagacactgttctaaacattttgtgggtaataactcttttaatcctccaaactgccctgtgagatgggcactattaccagtccttattcgatacctgcaattccaaaattcttaaggccctaacaatcagatttttccaaactttgacaccaaatcccacttggtggcaaaacccgatcagaactcatgtgaagctattttatttattatttatttatttatttatttatttatttattttgagatggagtctcgctctgtcgcccagcctggagtgcagaggcgtgatctcggctcactgcaacctctgcctgccgggttcaagtgattctcctgcctcagcctcacaagtagctgggattacaggcacgcatcaacacgcttggctaattttttgtatttttagtagagacagggttttgccatgttggccaggctggtctcgaactcctggcctcaggtgatccacccgccttggccttccaaagtgctgggattaccggcgtgagccacctcacccagccacatgaaagtaaagcttttattgatcccactcgtgactatccaaacatttcattctagaaattcccatgtttcaagaccactaagatattataaaacctatactatctattactatgtttctaatatcggaatgtcaaaacgcatcagacctcaagagtttcacacgaaggatgatgaattaggcccagggaggtgcagtgacttgcccaaggtcacacagaagtggacagcagagttgggactggatccaggccctctggttccagagtcctggctcttgacctctgaccctggctgccgcctctcagggctggagctggggtccacgggaggggcagtgctgggtcagagcacgggaggcaggagctcacagggtcctcactactgatgaccacgccgggtgcactgaggcccagaaggccacacagccattggatcatatctgcaaagcccagatagtggtgtgtgccagggagaaggggacggacactgggggaatgcggtgttacagtattaacggaggaaactgagaacctcagatgcatcctgtgtcatcacaaagaagctgaagaattaggtatcagagtatatgcaccaaaagaaaaaagagaaaaagaggccgggcgtggtggctcacacctgtaatcccagcacttaggtaggccgaggcgggcagatcagttgaggttgggagtttgagaccagcctggccaacatgataaaactccgtctctgctaaaaatacaaaaattagccgggggtggtggggggtgcctgtaatcccagttactcgggagactgaggcaagagggaggcggaggttgcagtgagccgagatcgcgccactgcactctggcctgggcaacacagtgagactccatcttaaaaacaaaaaagaggccgggcatggtggctcatgcctgtaatcctagcactctgagaggccaaggcaggtggatcacctgggtcaggatttcgagaccagcttggccaacatggcgaaaccccatctctactaaaaatacaaaaaattagtcaggcatggtggcaggtgcctgtaatcccagctacttgggaggctgaggcaggagaatctcttgaacccgggaggcggaggttgcagtgagccaagatcgcccagttgcactccagcctgggtgacagagtgagactctgtctaaaaaaaaaaaaaaactggaaggacatactccaagcttttcttagtagtgaactttatctgttgggaattatggacaatttttattcttgtgtgatattttttcctcaatgaggaaaaattacttttacagtaagcaggaataaaaacaaaaccaaacccagatatacctgagaggcaaacagcgtaagaaatggtagaatctgtggcataggcagaatcataaaataataataatgtatgtcggtgctgtccaatagaaatagaatgtgaacacgtgtgtaatgtttgtttggttgttttgttttaagacagagtcttgctgtgtcacccaggctggagtgcagtggcgcagtctcggctcactgcagccttgaccgtctgggctcaagtgatctgctcgcctcagcctcctgagtagctgggactacaggcacgtgccagcacacctggctaattttattttattttaattttttgtagagatggggtctccctatgttgcccaggctggtctcaaactcctggcctcaagcgatcctcccgtctcagcctcccaaagtgctgggattataggtgtgagccaccacacccagcccacatgtgtaattttaaatttcctagaagccacattgaaataataataaagaaaaaaccaaacaggtgaaatcaactttactaatatatttatttagctcaacaggtccaaaatactctcatttgaacctgtcatcagatgcaaacttgcgattgagccattttacactctttatggtggagcttcgaaatccaaggaaacccaacatgtgttttacacccagggcgtccagggcacctctcagtagcaacgcatgcagtccccgagcccagccagcagccccgatgctggcggctgccctgtgagatgctgcgggtttactcggtgcccagggacgctctgtggacacagtcaccttttgtccatccagcagccctaagaacaaggactgtgatcgccccgttttagaaaggaggaaacaggagcctaaagaagtggcttgctccatggcagagctgggcagggctggccggagcctgcgcccctccccgtctcgctcggccacctcacacccacccatcgccgttccccgtggacagacacggaaacagaggtcacgggtgtagtgtgaagagcagagccctgttcaaatcccgcctcccccgtcctggttgtagggcctgtcacttgagctctctgtacctctgggctcactcttaccacgaggaggatgatgaaaagcacttcagagggtgagggagaggagatgaggtcccagtgttcaggggtgctcagcacgtcgtcattctcattgttatcgttatcgttggcgttgagaaacttgtaccatgcccttgggattacagccctgagccgtccactgaaaggcggctcttagggccaagaaccgtacttttttttttttttttgagagggagttttgctcttgttgcctaggctggagtgcaatggcgtaatcttggctcactgcaacctccacctcccgggttcaagtgattctcctgcctcagcctcccaagtagctaggattacaggcgtcctccaccacacccggctaatttttgtattttttttttttttttttagtagagacgagggttttatcatgttggccaggctggtcttgaactcctgacctcaggtgatctgcccaactcggcctcccaaagtgccgggattacacacgtgagccaccctccccggcaagaactgtctgactgcatcctttcccgcagaaaatcagggccgcccccatcctggccccctgtcctccgactccctgttccagcctctcctctccatgccaatggccccagctgcacctcagccctctgcctctcccaccaggccctagaaaggtctgtttaggcagggcgcatgcctgtaatcccagctatttgggaggctgaggcggcagaatcgtttgaacccaggaggcgaggttgcggtgagccgagataacgccattgtactccagcctgggtaacaagagagaaactcagtctcaaaaataaaataaaatagaagtctgtttatacccacagatcccctgtccctcccctgggcccttcacaatcctcccaggactgcccgtcagtcccagcataagactctcccatgccccgctgtgctgccaccaaggcgacaatgacagtgagagcccataagacacagtctctgccctggagcagctcatccgcctggcaccaccttctccttcctcctctacttgtttcccccacctcctgttctggcaagtccctgagcccagcagacacactcttgcctctggcctttgcacctttcctgcttttttcctggatacctccctgcatctgtccttcaacacctagttccagggtcacttacacaggaggatgtcctggtcccgtctccccaccccagtctggtcagggatccccggggctgggttccctggagcccagagtccaggtgcctccagggagggcagggactgggtcccaaccacagggcgtcttgcgcaatgaaggactccaccgcctcagagtgaaaaggatagacgaaggataggcgcagtggcttacgcctgtaatcccagcactttgggaggccgaggcaggcagatgacttgaggtcaggagttccagactagcctaggcaataaggtgaaaccgtgtttctaaaattaaaaaaattgttaaaaagtaatatatactcatttaggaaaaaatgtatgagaagaaaataaaaattggccaaaatacatctacccagagctaatttatgttaatcatttggcacatccttccaattttttctatgcatattatgcagggatatattttttcattatcttttactttttttttttttttgagatagagtctcactctgttgcccaggatggagtgcagtggcacaatcttggcttactacaacctctggctcccgggttcatgcaattctcttgcctcagcctcatgagtagctgggattacaggcacacgccactacgcccggctaatttttgtatttttgtattttttttttttttgagacagagtctcgctctgtcacccaggctggagtgcagtggcacaatcccggcttactgcaagctccgcctcctgggttcacgccattctcctgcctcagcctcccgagtagctgggactacaggcacccgccaccactcccagctaattttctgcatttttagtagagatggggtttcactgtgttagccaggacggtctcgatctcctgacctcgtgatctgcccgcctcagcctcccaaagtgctgggattacaggcatgagccaccacgcccggctgttttctttcttttttctttttttttttttttttttagtagagagggggtttcaccatgttggccaggtggtctcgaatttctgacctcaaatgatccacccgcctcagtgtcccaaagtgctgggattacaggcatgagccattcattgtggcttgcttttttacaaaattttgatgatacaatatacttgcctgggtcctgcatttccccttaataacattgtgagtattttcttacatcatgaatagtgcttcaaagacatgatatgaacggccctctagagtactggcccacggctatacctacgtatggacattgatctgtaattgacagggtgatctttccttttctttctcctttctctctgtctctttccctccctccctccctccctctttctctctttcttttctttttttcttttttttttttgagtctcgctctgttgcccaggctggagtgcggtggcacgatctcagctcactgcaagctccgccttctgggttcaaatgattttcctgcctcagcctctggagtagctgggactacaggcacgcaccaccacacccggctaattttttgtatttttagtagagacggggtttcaccgtgttagccaggatggtctcgatctcctgacctcgtgatctgcctgcctcggcctcccaaagtgctgggattacaggcgtgagccaccgtgcctggccctctctctctctctttctttctgacagggtctccctctgtcactctggctgaagtgcagtgctgtgatcataactcactgcagcctcaacctcctgggtcccagtgattctcccacctcagcctcccaagtagctgggactaaaggcacacaccaccatgccttgctaagtttaaaattttgtagagatggggtcttgctgtgttgcccagcctggtctcaaactcctggccttgagcaatcctcttgcctcagcctcccaaagtgccgggattacaggtgtgagtcactatgtctgtgcttgatttcttctttcttttttttagatggaatttcactctgtcgcccaggctggactgcagtggtgcgatctcagctcactgcaacctctgccttctgggtttaagcaattctcctgcctcagcctcccgagaagctgggattacaggtgtgcaccaccacgcccagctaatttttgtatttttagtagagacagcatttcgccatgctagccaggttggtcttgaactcctgacctcaagtgatctactcgccttgccctcccaaagtgctgcgatgacgggcgtgagccactgcgcccggccgatttttttcttaataggcttctgccttgtctaacttcccagagtgaacatggctagctttcagaactgaatgagacctccgtgaatgctatttcacaggcaggagggtgtgaatgtatttgcagggagctggtgggggctcagcctgcaggacacagcctgaggatgggctcgggcaggccttgtggggcagggagaatggcggagtacagcaggaatgcctctgcaggtgcgggtcctgagggtcatttgggtcccaagccggcctggggtctctgcacccagccggagatgcgactgtgcctgggcatgaggctgggggctgtgggcatcgcctgtccagggcaggagaagcaggggcttgagaatgtctctggcctgactgggctagagctctaaaactcccccctctgccaggggacccccccagagcttgcatttcttcctcagagagagtatctggggaagaacccaacctggagcttctcagagccggttctcagagctcatttcccgggacgctaaacaccaacagcaaaaaaacactctctcatatcaatgcgttaggagcctgcacactccctccccgagactccagtgcacctggcgtgttgaagctccgtgaagcccagtgggagacagcggctttgttttgctcaactctagttttcccaaacataatacacatggggcccttctcaccaaacgcagcttatcacctccctgggaaatgctggtgattgataaagcaggcactcggttgctatttctattaataataataacatcaataatagtaacaggaggaggaggtcccggtcatcactgatcgctaggcagagaatgaggtggactttaaaagaaagcctggaccaagaggccggacacggtggctcatgcctgtaatcccagcactttgggaggccgaggcgggtggatcacttgaggtcaggagttcaagactagcctggccaatgtggtgaaaccccgtctctactgaaaacacaaaaattagctgggcgtgatgatgcacgcctgtaatcccagctactcaggagcctgaggcagaattgcatgaacttgggaggaggaggttgcagtgagctgagactgccactgcgctccagcctgggcaacagagtgagaatcgtctcgataataataataataaatacagaaagaacaaaggtattgctggtccatgtgctgtcaagagccccctggaactttccccctctctgggttacactgagatggcctggggcccccttcattcccagcaaacactctgtgccccaccctcccctccctcccttcagggtcccttttctcagtgggccccccctagctcatcctccccgtccaaagcggggctgcggccttgcccgtgggtcgtgggtcggccagcagggccaggtggcttcatgccttttaatgccttgcagcgcactcccccatttcctctccatccccacagcccagccccgcctcatcctctctccctgggcccgccgcagcctcctgcctgggcttcagtctctcccctccagtccatctctggggtcctgctatgccagagctgaccctgcctctgccctcctctagacgcctccggggctccccagtgccctcgggaagttcagcctgtattggaagccctgcctgggcatctgcctttctccccattcccctctgcatggcccctcactcgcagccctcactcggatacacgttagccaggatcagtccttggaccctctcgccgggcactccacctttgcacatgctgttccctctgctcaggacgcccttccctttcatccaccgggaaagctcctgctcaccctcttgaacccagcccaaaggtctccactcattcccccattgcttattgattgaatggagatacagcaggcctgcaggtgcagaggtggagaggggccgttgtctgtgaaaggacctcacaacgtcagccttgcgagctgctctgaaggcttgaggtgagactcactccgctcagggcttggcacctggaggcgtgtgctgggcacaggcgatgatgccttgcagggcacgtgttgctaggctccttttttgttttttttttttgagatggagtttcgctgttttcacccaggctggagggcagtggcgccatcttggctcactgcaacctccgtctcccaggttcaagtgattctcctgcctcagcctcccaagtagctgggactacaggcatgtgccaccatgcacgattaattttttgtatttttagtagaaacctggggggggggggtctctctatgttggtcaggctggtctcgaactcccgacctcaggtgatccacctgccttggcctctcaaagtgctgggattacaggcgtgagccaccgtgcccagcctaggctcacttttcagagaaagaagatggctcagcgaggccacatgaccaggaagtggcacagccagggtttgagccctgggcctcagccccctccatgcccacctcctgcctgcagctcccggagcctctgcggcaccccaggctcctgctgactcccccggcagccctggaggtgagcatcacacgtcatttcagagacaggagaccaaggctcggtgaagtcaagtgactcagcagggctgccggtcccggggagcgtgcacctggggctccagcccacagtgttttccaagtctccttggtgcctctggacagaggaccgtgacaacagcgtggccacaggcggacagcctgaggctgctcggcgctcagcacgcagtgacccagctgcagagggaagggggtgtgaagggagatgaagggacactcccaaagggagggggtggggtccccccgccaatcactttaataatgcagttgagaactgagtggaatgggggtgttgctgcaaagggaagcctggttttgttgaaacatgtggcatagggctgctttaaatagggagtctctttattttgaacagaattccagtctattctgtctcctcttctctgcagaatgcctgctgagcagcctcgtgggggatggttgaggctgggtttgaatcctggctttgctgctgaccagcctgaactccctggtggcctcgggcaagtgtcctcacctctctgagcccactttcctcccaggtagcatggggttactgtgatgcttggacaagacagtgagcgcttgggatgagacaatgaatgtgtgggacatggcgagcatgcagtaatagatattttttcattgttaattcagttgataatgatcattaacactggtcctggccagccacagtggctcacgccagtaatcccagcactttgggaggccaaggcgggaggattgcttgagctcaggagttcgagaccagcctgtccaacatggtgaaacctcgtctctactaaaacaacaacaacacccaccaaaatttaccctggcgtggtggcacactcctgtagtcccagctacttgggaggctgaggcaggagaatcgcttgaacccgggaggcggaggttgcagtgagctgaaattgcaccactgcactccagcctgggtgacagtgagactctgtctcaacaaaaacaaaaacaaaaacaaaaacaaaaaaacaaaacactggtcctgtctctgggcttccagtttctccctcagcatctttcctctacactggctgtcagaatgaccggaaatgcagttcagaccttgccacatccccactcccagcctcccatggctatcaccctcgacaaagtgtcagaggcccttcagaacctgccctgctgccctctccttgactctagccatagtagggagaagagagatgcatggggttccctctgcttgccacactctgtccagcctctctgcctttgcacaggctctgccccttttctatactgtcctcctccttgttctctggaaaattccaattgccttccttggaaaagccctttttgacccctggtccctcatcagtcacacacacacactctcttattagatccctatcgcagtgactataatttggtttcacacgtctgtctccttgtctaggctgtgagttggtgtgagtagagactgtgttggggcgacttctgcattcccagcacgctatgcaaggccaaattcgtgacagacttcggccaaggtctgctgagtaaacagactagagtgtctaaggctcttattggggaacaccctggttgtgctggtccctgtttccctcacgctttttggcctgggtgataatgccaacatgtcaaaatcatgttgacatcaatatgacagaacttgggaacggaaaagcattggtgttctgcttccaacctattctgctttttaccttcgtgtgcacgtctgagatcattaaagctacatcacctttcttgtgtttgtcatcatttttactttcatgatttctgtcctcatgttttaggtatgtctttcgattttaagtcagtctgaaatccttgtcttttaactggaagtttagctcatttacatttactataattactaatatatttgaaattcttcctataatgttattttgtgctttttaattgtcctgatttttatagcttattctttcccctttcctgtcttctttgtattgactgaatttcttatgattccatttcttctctctactgtattagaatttatatattttctcattatttagtggttacccttaaaatttaacatgcatacctaaagaccaaagccagttaattcttctcttctcctcccaaataatacacagaccaaagaccagttaattcttctcttctcctcccaaataatacaaataccaaagaccagttcattcttctcttctcctcccaaataatacaaagaccaaagaccagttcattcttctcttctcctcccaaatgatacaaagaccaaagactagttaattcttctcttctcctcccaaataatgcaaagctgatctcatctctgactctaaaacaaagagacatcctggtcagcttcccaataaggtaaaagggggggaatcataatttgttaactgccgattattgccagagctgtgctaaatgctctgaggtatgatctcatttaatctttgtggaaattctgtcacatgggggttatcaagcacatacccctgctcccttcatatctggtggttcatagctgagaaaatgaaggttcagagaagtaaagtcacttgtccccagtctcacaggctccaaagttgcagaaccaagactcaacgtctccttctcctgagcacagacatgggagtctccaccacacctacccaccctaaactgaaacagttgggctgtctgtgggcttcacaatgctttttgagctgtggggcccattcattcttacattaccatgtattgtttcgctcatttgacaggttattttttgagagctgctatgtgtcaagtgtcatactgggctctggggatccagctgtggacaagacagacaaagccctgtcttcctagatcctggcctcagagaagaagagagacactaaacaaaacaattatgccaacaatcatttaaccagcaaaggtgtacacagatcgtggaggctgccctggttgcagggggaggcaggcctggggcccctccaaggcctgatttgaaacaccctagaccagatcacctctgaagttgtgagtgtcatcaccctcatggccctgacacagagtaggatgggcaaggtggggattggttcttgacgcaggtaaatcctcctgccccctcaccctaacatctttagcctgacgaagatgttgacattttgtcctacagtagaggacctaggcctggggccacctctgacagccacatagctgcccacacttccaagttccctggatcttcagcccccatctgctgagcccacctccacctatgctgggctctgggacagatctcaatgatgcagatgtgaatccggcaaagggacgtggcccccatcaatgactgccttctaaccccgatggggactttccttttatcctgcaacttggcctgtgtagggggactttccactttggttgtggtaggtaaatattactaaagctgaaaaaaatcccactgagatctgttggggtttttaagaaaataaattgtgaagaaattccttattaaaaatgtaactgtggtaagaaaacaattaagtgaactgttcatcttaacattataaattgtatttatttatatttatttatttatttgagacagagtcttgctctgtcaccaggctggagtgcagcgatctcagctcactgcaacctctgcctcccgggttcaagtgattctcctgcctcagcctcccgagtagctgggattacaggcgcctgccaccacacccagctaattgtttgtatttttagtagagacagggtttcactgtgttagccaggatggtctcgatctcctgacctcatgatctgcccgccttggcctcccaaagtgctgggattacaggcgtgacccaccacgcccggcctgtttatttatttatttatttttaagacaggatcttgctctattgctcaggctggagtgcagtggcatgatttcagctcactgcagcctccgcctcctgggttcaagtgattctcccaccttagcctcctgagtagctgggattgcaggtgcaaacaaccacaccaggctaatttttgtattttagtagagacaaggtttcaccaagttggccgggctggtctccaactcctgacctcaggtgatctgcctgcctctgcctcccagagtgctgggattacagacgtgaaccactgcactcggcctgtttttatgttttgaatataatgagtcaatcacaaaagtttagcaagcttactgttgtttgtgtgtgtgtgttaatttttttacattcagattttaaaaaccgttatttgtcacatcaactgtctttatgatgacttctcatatttcttgcttgtccctgagacaaggaacttgtgcctccctctccaacagggacttccctgatgccatgactggcagcactgcaggggccgttgtgggcccctgattctcacactgacccggctcaggcctagacgtccctgtctccctcctcccattcatcctcctgggagtggcctcctgagcccttctgggaccaggccctggcctgggtggaaagtctggctggatggctacccgcctcccacccttccccaccaccaggagcccagagaggcatctgaacctgggtgtaaacaacaaggggatgagatctatatcagaggcatgtgcaagaccaagcaaggcagcaggactttgcctaaggcacctgcgggtggggtgggagagtggggttaagctgaggcacaggccatgggcctacaccgcttcctgggcagccttccctggcctcccctcactatgttcagctcagcagccccccgccagctcgtgcacgctgctactggacttgtttaccttccttttttttttttttatgatggagtctcgctctgtcgcccaggctggagtgcaatagcatgatctcagctcactgcaaccttcgcctcccaggttcaagcgattctcctgcctcaccctcccgagtatctgggattacagtaacacatcaccacacctggctaatttttgtatttttagtagagatggggtttcactacgttggtcaggctggtctcaagctcctgacctcaagtgagcacccgcctcagcctcccgaagtgctaggattacaggcgtgagccactgtgcccggatgagacttgccgactttctgaacgacctctttctgcacgcagtgtcgagagggcagggatctctgtatgtcctgctctctgggcctcgggtggtgcctggcacacactaggtgctcaataaacaaatcagggctgcactgaatgctgcagatggattagccggggctgttcagacacaggagggacagcccatgcagggagaaagatgcacgggtctcagctcagctcctagactcgccacggggtggtgacgagaccacggcatccttgtgaggattaaactgtctcgatatctgtaagccatggagaagagcgcctggcacagggcaagcacatctgtctgtgactatttaaaggcagggcaagtttctggaagggtgggaaggaaggggctggggtagcttctggtgcccagtagagggtgcccctgagcttggtgtagctgggagcgccaggcatactcatcctgatctgagatggggacagggtggcttgcagaaaggtgtcccctaggaggagttggtgtggcgactccagctgggtgtggtggcaggggtgtgtgggtacaggctacatctgggaggctaggaagaagctggggcttccagatgagcaaggacaaggccagagccaggctgggctgtggggatgtagactgggactcagtggcagttctgagactgagtcaccagggtgcagcgccagggatagctacgaattaggaagcattacgaatcgcgttgaaaaaaccaagttctgcagccagcctgcctgggccgagtcccagctccgttactaaccatgggaccaggaccgtttgcaagtgtcttaactctcctatgcctcagtttcctcatctgtaacatgagaagaataggacctactcagggggctgtcgtgaggctgaaattcactgaccctgtaaagggcttggagcaatgctgggggcccgactgacattctcccgcccaccctcgctgagctgtagaaataattggtctattttctagacgagaaggcaggctcagagaggtgactcaacgccttagcgtcattcgtggaggggagaacgcgggtcttgtgcctctcaggactcgcaggctgctcaacagagatgtgggactgatactcccacccagcagcctgtcccgaggctcaggggccatgtggctttgcaggacgccaagcaattctacgcctttgtcaatttaactttaacaggtgtgagccaccgcgcccggccgactgttcttttctgtaagtgtgctgtgagtcatcatgagaaaaagttaagaagaaactgacaaagtatgggaaatcctatttgaaaagggtagaaactgaggctcggagtggtgacaaggattatgtgggccccgagatggcgctgctgagggaatgaagaggataactcagctggaatgagagccagggaggccgcagttagacacgaagtctcagcagcccgggaacggacggcagagggcgcactgctccctcctatccagaggacctcctggctgctggtcgcaggcccgcggctggggaatgtcccagttgacctcaagagaggtcagctcctagattcccctctacagatcctcccttccgccattttctttctttctttcttttttgccttttttgagatggagtctctctctgttgcccaggctggagtgcagtggcacaatctcagctcactgcaacctacctctgcctccgggttcaagtgattctcctgcctcagcctcctgagtagctagtactacaggcacgcactaccactcccagataatttttgtatttttggtagagacggggtttcgccatgttggccaggctagtttccaattcctgacctcaggtgatccaaccgcctcggcctcccgaagtggtgggattacaggcgcgagccaccgcgcccggccctcccaccgttttcttccttaaagggctctaactgggaaaagtctgtccaatcaaaagctccatgtttcatgcccctggagggatcagccgcctggaaaatgcgaactagtgggtaatttaaaagctattcttggtatttgccttgataatgcactatggccggggtttttatttggttagtttgggttttgtcttgtttttttttttttttttttttttttttgagacagagtcttgctctgccacctaggctggagtccagtggcaaaatcacagctcactgcagcctctgcctcctggcctcatgcaatcttcccacctcagcctcccagggatctgggactacaggtgcgtgccaccacacctggctaatttttgtatttttagtagagatggggtcttgctatgttgcccaggctggtttcaaactcctgagctcaagcgatccacctgccttggcctcccaaagtgctgggattacaggtgtgagccaccgtgctgggattacaggtgcgagccaccgcacgccgccttttttttttcaagacggattcttgctttgtcgccaggctggagtgcagtggcacgatctcggctcactaccacctctgcatcctgggttcaagcgattctcctgcctcagcctcccaagtagccaggtgcccgccaccacacccggctaatttttgtatttttagtagagacagggtttcaccatgttggccaggatggtctcgaactcctgaccttgtgatccacctgccttggcttcccaaagtgctgggattacaggcgtgagccaccgtgcccggccaggttttgttttttgtttttgcaacagaattaccatcctgtagctgccccactttggctgtctgggcctggcttctccacactgactctcagggtgggacagacatatataccttctgaggcacatggcaagcccatgggggctacagcttgctgggcgaccttggataagtcactcagagcctgtgcctccatttccacgtccataagatgggagaagtcatcctgccctcacaggaataaatggggttagatgagcgctccctgaccccctgctccagataaatgctttgaaatttttgtttctttttcctcatttaggaaaaggtgagcaaattccagtatagccttttttttttctttccagcttgcataggattttatacttagtatttttaaagcttaatttgttctgattataaaagttattggctgggtgtggtggctcacacatgtaatcccagcactttgggaggccgaggcaggtggatcacaaggtcaggagttcgagaccagcctggccagcatggtgaaaccccgtctctaccaaaaatacaaaaatcagcagggcgtggtggcaggtgcctgtagtcccagctactcgggaggctgaggcaggagaattgcttgaacccgagaggtggaagttgcagtgaaccgagatcgcgccactgcactccagcctgggggacagtgcgagactccatctcaaaaaaaaaaaaaaaagttattaaatgctctcactgaagaaaatctagagaataaagaaaacataaagaagaaattaaatatccctgtaatactaatgcaaagagaaaagaccctgttgaccttcctgggtgtttctcggtcttttaaaatatattgcttaagttttaaaagtgaattggagatcctattcacattctttgaaagctcagtattacgttttgagcatttccccatgtcatccactattatttgaaactctgttttaaatagctgcataatattccattgtaatgggcacagtgattcattgaacccaggggtccgcaacccctaggccacagaccggtactggtgggtggcctgttaggaaccaggctgcacagaaggaggtgagcagcaggcgagcgagcattactgtctgagctctgcctcctatcagatcactggcggcattacattctcttttatttaaattacaaaaaaatttttttttgagacagagtcttgctctgttgcctaggctggagtgcagtggcacgatctcagcacactacaacctccgcctctcgggttcaagtgattctcctgcctcctgagtatctgggattacagacacctgccaccatgcctgggttatttttgtatttttagtagagacaggttttgccgtgttggccaggctggtctcgaactcgtgacctcaggtgatccacccacctcagcctcccaaagcactggggttacaggcgtgaggcaccacgctcggccagcattagattctcataggaacgtgaaccctattgtgaactgtgcaggcgagggatttcgtttacttgctccttatgagaatctaatgcctgatgatccatcactgtctcccatcacccccagatgggaccatctagttgcaggaaaacaagctcagggctcccactgattctacattatagtgagtagtataattattttattatacattacgatgtaataataataatagaaataaagtgcaccggccgggcgtggtggctcacgcctgtaatcccagcactttgggaggccaaagcaggcggatcatgaggtcaggagatcgagaccatcctggctaacatggtgaaaccctatctctactaaaaatacaaaaaaagtagccgggcgtgctggtgggtgcctgtagtcccagctactcgggaggctgaagcaggagaatggcgtgaacccgggaggcggagcttgcagtgagccgagatggcgctactgcactccagcctgggcgaaaatgagaggctctgtctcaaaaaaaaaaagaaaagaaaagaaaagaaaaattagccgctcacagtggggtgtgcctgtaatcccagctactcgggaggctgaggcaggagaatcgcttgaacctgggaggcggaggttgcagtgagccaagattgcaccactgcactccagcctggtgacagagtgaagcaagactctatctcaaaaaaaaaaaaaaaagaaaaagaaaaagcaatgcaccataaatgtaatgccaaaaccatctcctcgacaccccagtccatggaaaaattatcttccatgaaaccagtccctggtgccaaaagggttggggaccgctgatgtaaccagtcccttgtcagcaggagttgaggctacttctaaacgttggtagtcgggccatccttaaacacaactctttgaagcccctctaataatttccttaggatggattggtttgttccttaagctggaaccacacttgcttgccatacaacctcatagccggccccaggagggacccagagccgcccgctaaaagccttgggtggattcagtggtactttgttaaattaagtacatgaatatcctacggcccggcaattccctctgggtatatattccacagaaatgatcatgcagctcccagaggggtcctgagggaggatttgcggtggggcagctagaagcctccgggacgtccagtctcatcaggaagcagtgggggacttggcagatggacgggggtgggtgcccatcaattctgtagcagcaacagcagcagagtggacacacacagcaatatgaaccactctcagaaacacaggccgagcgaacacagtgagacaaagacagcgatcttaacgcagcttcatctgcataaattaagaatacgtgtacgcaaagcaacaatacccattttgcaagaacacacacaagcaaaaaatccacagtaaacacattaggaggactttctgtggggagagggtaaggcggggatatgaggataaaagggagggaaggaggaaggagccagtccggtgaggaccaggtacctgactgaggagcgaggagtggacaggctgggcccagccgaggtggtgcaccttccccccaggtcccgaggagatggaggcgaagatctgcacccggtcttctcccagggggccagggcatgtgagctgcggggaggcagtctcctggcctctgccttaaaaggcatttcctgaggctccaggcttgcaggccccaccaatctcaaaaaacagtggtggggccggggcagggcctcagagaattgctgatttttttttttttttttttttttttgagacggagtctcgctctgtcactcaggcgggagtgcattggtgtgatctcagctcactgcagactccacctcctgggttcaagctattctccttcctcagcctcccaagtagctgggactacaggcatacgccactatgcctggctaattttggtatttttagtagagatggggtttcaccatgttggccaggctggtctcgaactcctaacctcaggtgatctgcctgcctcagccttccaaagtactgggattacaggcatagccaccgcgcctggccatgatattttaaaaaacacatcctctgtcttactatggggaccacctactgtctctgtcatgtggcagaagaacattttaactctctcaccaaagatgaatggcaacgttctagcttcccagagagaggccagcaccgtcaccccgtggacttagagtcccccaaagtccccgcgaggttcttgctgcccacaccgcacccaggccaggggcaggcgagaacaggagtctctgagccaccccccagagctcacgggagggcgtcgcagggattcgcgtcggctcccaccgacagatggctgcaggcctctgccaaggatccgggcaggagttcgggagctggcctcccattcagaggcaaacaactgctgggcacctcctgtgtgccaggctcggccctaggtgctggggatccggcagggaacattgcaaagtccctgccttcatgcaggtggcagcgcggcgggggacagatgacaaccaaggcggcaggtcacacgggaggctctggaatccccagaattcagcctgccgctaccaatgctccagtgccaggccctggtgtgtgtgtgtgtgtgtgtgtgtgtgtgtgtctctgtgtgtaagggagaagtacactcaaatgaggaagccacatagaactcacagggcggtgcttctctcatcatccctcagacccagaaactccgcttctaggaatttatcccaagggcagagtccagaacattaggaagaatgagccaacggatgtccccccggtgttgttcatatcaactcagaaattggaaataaggaggccgggcgcggtggctcacacctgtaatctcagcactttgggaggccgaggtgggcggatcccttgaggccaggagttcgagaccagccgggtcaatatggtgaaaccccgtctctactaggaagtacaaaaattagctgagtgtcgtggtgggcacctgtagtctcagctactcgggaggctaaggcaggagaatctcctgaacccaggaggcagaggttgcagtgagccaagactgtaccactgcactccagcctgggtgacagagtgagcctccatctcaaaaaaaaaaaaaaaaaaaaagaaagaaaagaaaaaagaaaaagaagggcctggttaaataacaggatgctggctgggtgtggtggcttgggcctgtaatcccagaactttgggaggccaaggcgggcagatcatctgaggtcaggagttcgagaccagcctgcccaacatggtgaaaccccgtttctactaaaaatacaaaaaattagctgggcgtggtggtgtgcgcctgtaatcccagctacttgggaggctgaggcggtagaattgcttgaacgcgggaggcagaggttgcagtgagctgagattgcaccattgcactccagcttgggcaacaaaagcaaaactccatctcaaaaaaaataaaaaataggccgggcgcagtggctcatgcctgtaatcccagcactttgggaggccgaggcgggcagatcacgaagtcaggagatcaagaccatcctggctaacacagtgaaacctcatctctactaaaaatacaaaaaaattagctgggtgtggtggcgggcacctgtagtcccagctacttgggaggctgaggcaggagaatggcgtgaacccgggaggcggagcttgcagtgagccgagatcacgccactgcactccagcctgggcgacagagcgagactccgtctcaaaaaaaaaaaataaataaaaatataaataaaaataaaaaaataaaaaagctaaaactccatttacaaatcagcagcaattgtgcaacacactgtgcatgggtggggagggtgtccgaatgcaaagacaccaaagcgaaggagagctacccatggctgtgggattatggttggcttctgtcttcctgtttttacttaggtatattttctagtttttctcaattaatttatattcattctgtaataagtaattaaaaatacacttatggctgggttaggtggtttatacctgtaatcccagcactttgggaggccaaggtgggtgaattgcttgggtccaggagttcaagaccagcctgggaaacatagtgagaccctgtcttcataaaaaagaaaaaaaatcgagaccatcctggctaacacggtgaaaccctgtctctactaaaaatacaaaaaattagccggacgtggtgggtggcgcctgtaatcccagctactcaggaggctgaggcgggagaatggtgtgaacccaggaggcggagcttgcagtgagccaagatcgtaccactgcactccagcctgggcaacagagcgaagactccatctcaaaaaaaaaaaaaggtcaggcttggtggctcacgcctgtaatcctggcactttgggagtccgaggcgggcagatcatctgaggtcgggagttcgagtctagcctgaccaacatggagaaaccctgtctctactaaaaatacaaaattagccgggcgtggtggcacatgcctgtaatcccagctactcaagaaggctgaggcaggagaatcacttgaacccaggaggtggaggttgcggtgagccgagatcacgccattgcactccagcctgggtaacaagagtgaaactccatctcaaaaaaaaaaaaaaaaaaaagaattagctgggtgtgatggtgtctcccagtagtcccagctactctggaggctgaggcaggaggatcacttgagccagggaagttaaggctgcagggagccatgatagtcccactgcactccagcctgaatgacagagtgagaccctgtctctaaaaatgaaaccatttacatagagacaggaaagagccaggaaggcattagaacaaaatgtaaacagtagttatttatatctggtgatggaactagggtgattttttcaattttttatttggataactaaagagttattacttttttttttttttttttttttaagacagggtctctctgttgcccaggatggagtgcagtggtgaaatctcagctcactgcaacctctgcctcctggtctcaagcaagcctcccacctcagcctcttaagtagctgggaccacaggctcatgccaccatacctggctaatttttggttttttagtggagatggggatttgctgtgtggctcaggctggtcttgaactcctgggctcaagcaatccacctgcctcagtctcccaaagtgctgggattacaggcatgagtcaccgcgccaggctaaaagttattactttttaaagagcctctgggccaggcgtggtggctcacgcctgtaatcccagcactttgggaggccgaggcgggtggatcacctgaggtcaggagttcgagaccagcctggccaacctggtgaaacctcgtctctactaaaaatataaaaatttgctgagcgtggcagcaggcgcctgtaatcccagctactcaagagactgaggcggaagactcgcttgaacccgggaggtggaggttacaatgagccaacgttgcgccactgcactccagcctgggagacagagcgagactctgtctcaaaataaataaataaataaatacaaaaataaagagcctctgattaccctcgacgtggtccatgcctcttgctgtctgggatgtgtccactgagggaggccaagcccactgacaaacactcacaagcatccactctcgtggactggacgaacacaccctccatccatgtctctgggtggggcagggggcggtgcaagaacccctgggtggggaggatgagaaatagaggcgtctggatccctattgatgcttttcaccctttgacaatgtccaccttgggtgtgtgctttaccaggtgcatgatatacggagggagcgggcctgtgcatgacttatcataaatgaatgtacgtccgctggtggcgctcagcacgtttgtgggactgaattgttcactgagccccctcgcccccccacaaagagaaacgggtccaggttctacgacggggatgttgccacggcctggggctgctggtgagtggcgtgggtgcctccctgtcccacgctctccctggccatttctgcaaagcgcgtttccctggcgtgccgtcccagccactggctccttttcctcctcatttcttccccactagaatgtgagctgccggggctagggctgggctttgcctggctcggtcaccacccaggacagggcttggtgcagagccggtgctgccggtgtctgttgaacgtcacgtgtataagtgggggaaggatggagtgcagggaagccgggggcaggtgcatggggaccgcacagtgcggaatgtcacctgctcaagggagatgtggatggatcggtggagactgcaactagggagatgcagggcagactcaaagcaaactggcagacatgggagcctgtgggaggtgggcgtggacagagggacaaggccctgcgggagcggggggtggtgatgtgacgacgcccctgacgtttctggaccccttcgctggcccttgccccacagccaccaggaagggactgctcccctgagaggtcccttttcttccctgaatctggctctcaggatggtcagatgggagcagccaagtcctcccaccctttcccagggacagaccaggcagaaaagcagccgcatttcttacgggagctgttacatctggaagattagatctggaggggctgggacctctggcatcggcaccctcttctctcccagctttacaggctggaacaggaggaggcttgcttggaggcaggagttggaccaaatcagcctggggtaatgatcccctgggaatcactggcaatgcctggagatatttttggaactgggggtggggtgctactggcatctagtggccggaaatgctggtaaacatcctacagcacacaggacagagccccccaccctgcccgccaaaggatgatagggcaggccccaaatgtcaatagggcagaggttgagaagccctgctttctaatagcacagctctgtccccccaagccctcgcttacggcctatcctaatcagagtcatcattaattgagtggcagctgccccatcctgagcaccagccacaggccaccatggcgccaagcaccacagcgttctcagcctctctgctctccaattctcacaccagctccaggaaatggggacgcaaaccctgcactgcccggcaaatgaccatggaaacgcctcctgtcctctgaccactcgccaggtgccagcacacaagctaacgccccaataagtaccagacccatcagccctcacagcaacacctcaacgcaggggcttgcattgtccccgcttttcagatgaagaaactgaggctcagaatcatgccgtcaccttcccaaggccacgagagggtgtggtggtgcagatgccacaggggtccctgtgaaagggttgctctccacaccccagggactccagggctcggcctaggccgacccgcctgtcctgtgccgggggggctgggcaggtggcctgcacttgggccccgacacggtggctcagagacagggagcactgtgctctcaaagcccggagggcctccactccacctcgggagcccggctccagctgataggatgcagacccgcaggccacatccacaggtgccggagacggggaagccccggtgtggggaggcccagaagggatgggctacatctgcatgcctccccagtgtcccctccaaggtccccctctgcccgctggccccgcatacctggatgccgttctcttgcaggttcaggtaccgcgtgttgaccgggatgctggctgggacctcggccaggtctctccgtgtgcagatcacccggctggcctggttgctgcaggagcaggccacggggcaggaggtggccggcggggagccccctccggcggcagacgtcacggccactccacctccaccggcccccaggggtggggagaagagccagaggaagagcaatgccccgtggggccaggacatcctaccgggcggcagcggggggcacggggagccgcgggcacgcgccatcctcaatgttcatgctccgcgtggacgctggggggctgtgggtgggggagagaagggggagaggcttggtgagggacaggagcccatgtggcctgggtgcttgccaacacccaggcagccccatcgccgcctccctgccccatgcccagaacaaagggacagggagggagacagctgccgatggacccacccagcaggctggggcaggcagagggaagcttggcccgcctggccctgcactagctcatcctctccatgctggcaagattctacgcccattctgcagcagggaaaactgaggctgggggagaggaagtgcctgcccaaggtcactcatccagtaagtgcagaagttgtccagattcaaaacccagttctttgcatgacttcaaaaaggtagatacatcagaggagtgagacagacagacagacagacaaggcgagggggcagaaacggggaagagcaagcgaggtggcgaggacctcgctcccatcccaacacccgcccggtccccttgccacctgcgtgatcacctgggaggtgggtcccagcctcctctcccctccactccctccccctctccccatcccagggatgttagcgaagagatgcatttcccccaccccctgtgccctcagctaaaccgaaagaccctccgctgcacaccctcctgtcactgcccaccctgtccaggccctgtgggggcctcacagcagcttcagagacttgagtcagactcatgggagaatctgagggagagagaggtaaggtggcagacaaggcaaccgtggaggtgacaggtgtgggcaggtgaagggagggctgggaggcagcagggtgaagagggaggagactggagcttgtgtgtgagggtggctggggacctgacggggggcggcacaggccgagaggccaccagctgcaccccctcctttgccccgagactgtgggtgctccaggcagagacagccccgatgggactcatgccagctgctgccgcaggaccgagcttggttctcggggaggggatggggaagggaagggggtccagggactctgcctgggttctgggaggaaagcagacagcggggactcgggccctctgagaagtcacgctgtacctccccaatctgtcctgccccgccatttccatggaaccagagagggaaaggggatgggtgagtcacagcaacgataccagtaacaatagtctctccggaacactgggtgagcccttgcaatgcagcaaactgtatcccggtcatctcatgtgagcctcataatgaccataggagaaagctattaggatgcccaatttacagatggggacactgaggcactatgagggaaaacggcctgtccaagggcacagagcaggccgggagggcgcagagggggtacttcggccctgggtctaccctctggctcccagctctcctttgcacgcagcatctctgagtacacacaaatacacccacaccagcaggccctgccccaacacaggccaaccccaaaccattcccaagagaccaggaggagggcaggtcacacaaacacgcacaccgacccactcacacactcagcagtgatggggcacaccctctcacggtggactctcaggacccccctctcacggtggactctcaggacccccgacacaggctcacccccaggcacacggctatgcacacacacagtcactccctcctcctgcagtttccaagaccattttaacccagataaaaatgtgtgtgcatacgtctgtgtatctgagtgcatgtgtgagagcgagggctagacagagacacagagagacagagacagaagcagaggcagagagacagagggcaggggaaagagggagctggggagagaaagagagagaggttgattctgtgtccacccgggctcatttttctcctgcagggctggggccgtgtgtctgtgtctgactatgtgagtgcggtgagggtcttcattttcctgaatgtgaacagggaggtcaatgcccagtccttatcctgggtcaggggctcctacctcttaagaccctggcgatgatccagcccacaccctcttagccaaagggctggcccaaagcgcagggcctggatttgaggccgggggaccccgcagggcctgtgggagcccacggcacccaccccggcctccaggcctgccgctgccatgtctacctccgcatctgtccccagctctcccgctgccagcccgcatccccccacccccatcacggcttctgcagcgactcggcctccctccccttccccccgccgccctccgccatctcccatccttttctccccacaaccccacggtgggggacactcaccctggtggcttggcttccgctgggcctctccctgcgcccaggcccccccctccacatgcctccggccagccggggtctctgcctccccagttctccagggcttcctgtcgagatcgtgctggggggggcgcaggggcttcttgggtctccccgcgccccccccactggcctgtcgcccttcccacccctggggggggctgtcctttggccactgcagcagttctctgctcccctccccgctcgcctcctccggtctccttccaccccctctcccacctctacctcgactctcccccgaccgcagcctcctttctctccacccaccgaccccagcccccttaactctctctctgcccctctcggtcctccccctccgcctctggtccccgtccacctcctctggcctcaaccccctcctgagtctcccccctcacaatcttgcctccctcgggacccccaggccccttctctccttctcctccatctattcctccctcttgctctatccctgtcaccctctcatcggccctgagcccgtctcagtcaggttgtctgtctgtccgtctgtcttggtccctttctccccggctctgtctgtctctctctttctccgcgattacaatttctagtcacacggcagtgcagagccaagctgtgcctcagctccctccctccccacccctccctccttctttctctccttctgaacggggagggcgcctctcctccctcctcctcagcctcccttccctgcgccgcctgggggaggcctccccctcccccgctaatcaaaggctccgttatctaattaacccattggttctgggcagccgaggaggcagccgaggaaggtcgggggaagcgggggaggaaggttgccggctgggctgcccaagaaaggggggtggttgggccgtgccaagccggagcctcatggcacacagacagcctcgttggctgcatgaccgggctgggccaccactgaccccctcgcccccacttccagccaaaaccccccagcttcacaccccccactgggtctaggcacacaatcttgcccagcgttttcctgcagatgcccctgtaccccaggaactcctttgaacccccaccatgccacacagcctttactccaaccctgatataccacacctgatataccggcactggaacctgcgccctgcaccgtcaccccgtcccgtggctgagggccagcccctctccatgccacaaaggcccccacccctagaggaacccctctcccttggaccttagccagatcctgacatccacctcctgacacacttctgcaaaatctgcagggcagccacgttcattcattcaacttatccgcccatccatccgtccatccatccgtccacccatccgtccatccatctgtccatccatccatccatccatccatccatccatccattcatccatccgcccatccgtccatccatccatccatccatccatccatccatccatccatccgtccatccatccgcccatccgtccatccgtctatccatccgtccttccatccctccgcccatccatccacccatccatccatccatccatccgtccacccatccatccttccatccatctgtccaacaaatgtctacccagtccctgctatgtgctagacactagcccaggacacccatgggccacaaaaggcacctctcgagagtggggcacattggtgagtgccgagaggcctgggtttgagtcctgactctgctgccacttcccgtgtaacctcgggccggtggcttattctcccaagctgcagttccctccactgtgaaacagggataatgggagtatctgcctcctagggccactgtggggattaaatcgctaaatccttggtaaagagttctgtcttcacaacatatgcggaatcagaccccagaatcagaggatctttctccccacgcccaggctacttccctgacctggctcccatctccctcttgaacgattacagtgtcctcccctccagcctccccatttctgccttcacccccactccccgtgcgttccccacgggcagcgaggggtatcctgtcaacaccccatggaccctgccccgcctctgctccacagccttccacagctcccgtcccactcagagcagagatgaggacttcagttttcaggtctccactctccaccccagctcctcctctgacctcatcgcttccctcctccccctgctcactcgctgtttccagaacaggccgtgcacaccccggccccagggcctttgcacctgctcttcccttttcctggaatgctctttgccggttgtccacagggctcttgccctgctctctatcaggtccgtgctccaatgctaccttctcagtgaggccgtcctgaccgccccgcatcaaacagcacccctatccctctccagaaccttctctgtttcctttttctccatgacatttatcagcatctgagcttttatatgggtccgtgcgcttgaaggcaagtttcccgagggcagtcagtttgtgactatttggttcccaggacccacaacagtgctgggcacatggcagttgctcaccaaacactgggtgcagggacggatgggtacgttatcatcactgtgagtctatttccccccacgctcacacacagatacccccactctccgttctgcacaccgagccaggccgcactgcaatagctgcacaatgcaggctcccagccctggacaccctcggtccccaggtccccttccatcccaggaggcctgctggcagaggcagcaccttttttttttttttttttttgagacagagtctcactctgttgcccaggctggagtgcagtggcgcgatctcagctcatggcaacctctacctcctgggttcaagcaattctcctgccccagcctcctgagtagctgagactacaggcgctcaccaccaccccggctaatttttgtattttaagttagaatcgggggtttcaccatgtgggccaggctggtcttgaactcctgacctccagtgatccacctgccttggcctcccaaagtgctgggatgacaggtgtgggccaccgtacctggccgaggaagcacacatctcacgtcagctggacaccaatgtcccgggtcaccctccatgccctgggtcaccctccgtgccccagcaccacccggatggctaagtcccagatactacacctcaggttccaaacaggaggtccccagcgcagctccgtgcacccagaggaaagctaccactctgcccaaacctcagataccacctgcgtgagctacactcctggatacagctgcatactgagagggcacctggccccagttgtccccagatagagccctctgacctggataacaggaatgctggctaacctcatctcttccgcacacacatctgacttgcgtgaactcactgaataatgacaccaccaaaggtggtaacgtccaacacacatctggcactgactgggcaccattctgggagctttacttgcattagccaccgcagttcacatcaaccctctgagagaagactgctattacacccagttcccagctagcaaagctgagacacacagaggtactgttagttgcctaatgcgaaacacacggctaggaagtggcccctcctaggtcagccttgccagagtccaggggccccaaagacccccaagtgtggcctgacagcagcaacaattcccatggaggctgcctgtgtgtggggggcagggtgcaggcaaggccacaggcatgctgaacagccacccttcctcagcccctgcagtcacccgcactgcacaggatatcacacgcccgacaccccaccacggcttcacgcccggctggcagaggctccatggactgccctctgcccccacgcacccctagtagtgatgggaaatactgattacatgtgggtgccatgctatccactcctcaagctgctggcttctccccacggccctgggaggaagggatggttcttgtgcccattttacagattcagaggtgagcggcacttgccaaaggttacacagccctccagcagcacagccggcattggaaccccagtcccagaacttagccaggtcaccacggttgcctctcccaccgcagctgccccgggagaggacccatcacaagggtacacctgttctcctccctcacctggtgcaaggaacaagccagaggtgcagacacagaaggaccccaaagaggagaagtacgaggggcagagagtggcagagtcacagggagacagacacaggcatacaaaggggcatgaaaggggcaggaggacaggaggccccgagatggagctgagatccaggcgaaggcagaggctgggagggcccgggcactcgaggcgtgaagctgagtcctcaccggcttcgccatcctccccagccccagctctgagagatctcgggcactgtgcctgggaggattcaggcagatggcagatcggaaactcggggacccaggagaggcggggtgaggagaaatgggaggcagggaacgttcctgtcaggcgcactcattttttggggtggggtggggggctaaattcagacggccagagggaagataggaaattgactaccattgcagcaagaggcctggaggttagagctagagaagaacttccccactgcgagggactggggcagaagtggagcctggagcccagagggtggagagggattgaagccggggagggatgagcccttctgtccctggaagccggtcctatgggagagacccgggttctgggggaggggacaggcagcgctggcgttctgagccaatccatgtcctgaatgctttcaaaataaaagcagccccacagcgccgagaattgtcaggcttctatgtctggaggtagaagaaccttagggaaagggcagtccaggccccctaggagctgctgatgaggaagcaggactaggggcttggctcagctcacgaatttcccgggccactggccactgggcagcaggaccaacaggcggcccgtgcagtgggggtgcagtcggggtgggggtgaggtgcagtgggtgggggtgaggtggtgacttgcttggaggggggctgtcctttcccgtgcagccacgccgctctcccccaggctcctcccacccaccaggcgcctcccacccaggctcttcccatccacaccagacccgttcccctgaggggactttgcccctgctgtgccctcggccagccgggggtgctcttcctggggtcagggggggctctgcgttcccacgacacctccaggaggtcttctttgagctccccctaccgtccgtatcccttgcacttccttttcttcacagctcgtgtcacggccacccagcacctgatgctcggtgatttgttcctgcgttcattgcctgccttcctgctaagaggggagcccctgagggctttgccgcggcgtccacggctgcatcctcaaggccggccaacggcgctggcccctccgagcctcagtatttgctgcaggaacgagcgagccagcgccccctaccggcagttcctctgctggcacccgaggcaaggagccctgggtctctagggaggcaagtgtgggggtgggggagccgtccgagggctaagtgagagggcgggcacagggtgggccccggaacgtccaggagggaagccgggaggagggaatgtcgagctgttacagaggccgtggcaatgggccgggggcgggggggccctccttcctctcacaacgggctgtgacaacagaggggcaggctcagctctggtgggtgaaggacccctctgagtggactggagcggcgcggctggaggccagggaggagctgcgccaggggtccgggggtagaggatgaggccgcggctggagccacggggatggagagaagggaaagagtgaacagataaagcaaatttgtaaaagtggcagaacctggaggcggtgtaggaggtgagggagagggaggagccaggctcttcttatagatctggggtcaaattccaaaagccagaagaggatgtggggcgggaagcagttacggggagaagagaatgcaaaagtccctgccacaggccccccagccccaatctccactcacaggcggtgcctcgctctggtcacacccacagggcagcaggggagctggggacacaccgcccacccggctcccgtccagtccctggctgtgccactttgggccagctgcagcctctctgatgatgctgcatggggctgtggcaagggggcccaagtagggcctggcacacagcaagtgaccagcaagtgacatataggactcggagcctggctggaagccaggaaaagcagaaacctgggctccgaccccccggtgctgccaattttccgctaggaacagtaccctgtggccactcagtttcctcatcagagaaatgggaattaacagcaggtttcagaagagggctgggagggctgggtggggggtggtggggacccaggaagggctgaggtgagctatttaccagccagcggaggactacacttgacccttgaaggacaggggtttgaatcgtgtggtccacttatatgtggactttctcctgcctctgccactcctgagacagcaagacaaccgccccctcctcctgctcacagcctactcaacgtgaagacaatcaggggagcccgttacgatgatacactccacttagtggctagtaaatgtattttctcttccttagcattttctcaataacattttcttttctctagcttactttattgtcagaattcaggatagaatacatttaacatgaatgtgttaactgactgtttatgttattggtagggtgtccaatcaacagaacactattaggagttaagttttaggggagtcaaaagttacaggcagattttcaactgcacagggggctggcacccctagcccccaagttggtcaggggtcaactgtatacatacacacacacacacacacacacacacatacacacacacatacatacatacacacacacacatcacacaaatttctgctggagtgcagtggcgtgatctcagctcactgcagcctccacctcccaggcccaggtgatcctcccacctcagcctcctgagtagccgactacaggcgtggaccactacacccggctaatttttttgtatttttgtagagataagcttttgccatgttgcccaggctggtctcaaactctcggcctcaaacaatcctcctgcctcagcctcccaaagtgctggattataagcgtgagccacggcacccggctgtatttcaatatatcaatgcatcactgtcaaacagactctctgcaatgatgcaaatgttctctccgtgctgtccagcactggtggccaccagccacacgaggctacggagcacgtgacgtatgtcgagaaggagcagggactgaattcttcattcgacttgatgtgactgttgctgctcatgcatggcagtggctgtggcagctactgtgttggacagcatggatctaaccactgatcctgcttggaactgcttctgcctgagtccctgaagtgccgctccgtctgctccttggccctgcccagctacctcacagggctcttatgggactcatggagaagccagggagatcacagctggagaaatggaatgttatggagagtctgaggcctgagcacctgaccagcgctgccttggttgcctgtgccaggcctgcgctgcgggagctgcctgcaagagctcattcagtccccgcaaggggcccatggcgagagctgctgctgcccattttacagaagggcacactgaggcactgccatacccatggatagccagatttgggtaggctttgagataaaaactgaacttccaaaaaaaaagaaaaagaaaaagaaaaagaaaagagggccgggggtggtggctcacgcctgtaatcccagcactttgggaggccaaggtgggcggattacctgaggtcaggagtttgagaccagcctgaccaacatgctgaaattccacctctactaaaaatacaaaattagccgtgcctggtggcgggcgtccataatcccagctactggggaggctgagaaaggggaattacttgaaccgaggaggcagaggttgcagtgagctgagatggcgccactgcactccaacctgggcaacagagcgagactctgtctgaaaaaaaggaaagaaaaaaaactgaacttccaggtccctggactgtgattctgtgctgggatggggcggcttaacacccctgaactgaattcaccccagaagagaactgggccctggcctggcattggtggtttttacaacagtatttgttgccaaggctcaggcagtggggcgtgagagcgagtttgcaggttgggaggggcgtggcccccgccagctccactcataggggtcctgcctaggaaggacgctgatccgatctgttttctctcacagggttgtgcatagttattttgtttacaacaaaagggtgctgctaaaagtcataaaaagctgaaaactatgtgaactggagcaatgcttctcagacatgaatgtgtgtccagctgtctgggaatcttgttaagaggcagattctggccgggcgcagtggctcacgcctgtaatcccagcactctgggaggctgaggcgggcagatcacttgaggtcaggagttttgacaccagcctgaccaacatggtgaaaccctgtctctaataaaaatacaaaaattagctgggcgtggaggcacctgcctgtagttccagctactcgggaggctgaggcaggagaatcacttgaacctgggaggcggaggttgcagtgagccgagatcgcaccactgtactccagcctcggtgacagagtgagattctgtctcaaaataacaataacaataacaaaaaactgcagattctgcatcgccatatctagggtgaggctgtcattctgtttcccaggggatgcaggtctcacagcaaggggctgaagggtctctaagtgcccatctcactcctatattccatttcgggatgaagaatgaagccccctcctctcctctccggagctctgtataggggtgtagctcaaggtgggccttggaatcaactagacctgggtttgaacctcagctgccacagttactagccatgttggcttgcaaagggagcttcacccctcaggacctcggtctgctcacctgtaggtggggaaggtctgatatctgtgatgagtttagggaaatgcctggggcataaaaggaaaatgctcagtgaacttattccaggatccagaagatcctccttctcctcgtctacctcatcacaccgtcctgtgaagaggaaggatggagaggtggaaagagtgttggtgttgaggaaaactgggttgaaactctggctggccactttctccctgtgtcccccgccccaggctccgccttgcagtctgtgaagataatgacacctattaatagcttgttggggttcctggagaccatgtacagtgcttgacacttaagtgacagctacattaaaagttatcatttattctcggccgggtgcagtggctcacgcctgtaatcccagcactttgggaggccgagacgggcggatcgcttgaggtcaggagttcaagaccaggccggccaacacagtgaaacccccgtctctactaaaaatacaaaaaattagccaggcgctgtggtgcgtgcctgtaatcccagctactcaagaggttgagacaggagaatcgcttgaacctgggaggtggaggttgcagtgagcgaagatagcaccactgcactccagcctgggtgacagagtgagactccgtcttaaaaaaacaaaaaacggtatttattcttacgggtcagaagaacaaacagttttcccattccatgactcagccccctccccacccaaccccgccacttctctgccattgtaaatccagcatttctggctggatcaaaaccactcatctgtcaaggagtggggggcccatgggatcacatttggggtctttgcccttcccgcaacaagatcctacaacccccacgtcggtgagggctgattctctactgtgagaatcagcatggggagtcctttcccttctggtgcttgagaggcataaacaagattgagaacctgacagcccctaagttatagcagcttcaatgccttcaaaagtctagacttgttggccgtggtggctcatgcctgtaatcccagcactttgggaggccaaggcaagaggatcgcatgagctcaggaattccagaccagcctgggcaacatagtgagaaccccctctctacaaaaaatacaaaaattagctgggtgtggtggtgcacgcctgtaatccctgctacttgggaggctgaggcgggaggatcgcttgagcccaggaggtcaaggctgcagtgagctgtggttgtgcccctgcacttcagcatgggtaacggagcaagaccctgttctcccccaactccaaaagtctaaccttctatgagtgtattgttattaacaacctaattattgtgattattaacaattttatggccgagtgcagtggctcacacctgtaatcccagcactttgggaggctgaggcaggtgggtcacttgaggtcaggaatttgagaccagcctagccaacacagtgaaacggtgtctctaccataaaatacaaataaataaataaataaataaataagccaggtgtagtagtgatgcgtgcctgtagtctcagctactcaggagcctgaggcaggagaattgcttgaacccaggaggcagaggttgcagtgagccgagatcgcgccactgcactctagcctgggtgacagagtgagaccctgtctcaaaaaaaaaaaaaaaaaattgaatttccacttttagggcccaatggaccagtgcattctcctctcttggcctcagtttccccctctgtaaactgggagtctcatggagggaggcgacctgcagggcggcccacaccagggtttggagtcccggctctgccatttctaggtgtactattttgggcaagggacccacctctctgggcctcagtttccccatctgtcaaaccagggatgatgactgtgcctccttgcagggttgcctgaggaatacacggaaaaaatccacataagagactgagcactgagcctggctcgtggcatgctctcaatcagttagctacgatcatggtcatctccagctctggagagagggtttgaggcaaggggagggccaatctcctctgcgtttaccccctggggctggcctctgcagtggagctgtggctgcacagccttctgacctttgttgtagtgtttgaacaagaactctggggcctaagctcaactccctgggctggggcagcatctggggggcacagtgagcctgggagtggctggggctgctgccccctcctgccctgcctcactctcttcctcctctccatccagggtttttttttttgtttttttttttttggcgatggagttttgctcttgtcgtctaggctggagtacaatgggcatgatctcggctcactgcaacctctgcctcccgggttcaagcgattctcctgcctcggccccctgagtagctgggattacagactcacaccaccacacctggctgattttgtatttttggtagagacggggtttcaccatgttggccaggctggtctcaaactcccgacctcaggtgatccacccgcctcagcctcccaaagtgttgagacggcgtgagccaccatgcctggcctgtctctgtctaggtctctcaacctcccaccaggatcccagatactaccagacaccccccattctcactctcagcagccctcctggggaaacagcagtcccctgggctcccgcctgcctcccgcagtgagcccccatcagcccctctcgtgggtctccaaggcagcccctccacctctgcctgccatgacaacagttgcgcgtgggtttccaggcaacaaggggcatcctgccactctccttactctcctgccaccccctgtctggcggagccagcccagcctcaggaactgggactcgaagggaagggaggttctccccagtggggacaaagggtctccaaactcagagttaatgaggtttcccgtaccccaccagagaggacacaaagacgtgcccccttcacccagcaagggtgatggtggaggggatgctgctgggcttgagcgctgccaggcacagaggggagccctgtcctttgcacccctatctggaggtgaggccctccctccagaaacagcgtccgcatcccaggtcctctaaggcagcccctgctctccacctgctctggggccaaatgtgcagcctggtgtacagagaagcccaccccctgcctacgggctgtgatgccacatgctggggacaagagtgtggggtctgtggcccaccccagccatcagccagctgagaaggacaggctgcaacatggtgccttcacgcaacgctgactttccaacactgtgaggggctggcagtttcacagcagatcctggtcctggagaatgggcgtgtgctctgcgtcctggcagtcttaagaaccacttctcccagagaaggataagactcttcctgctctcggcaagggaaggaggccatttaagtggaaacagggcccagtcaaagtgaggcttggagttagggcaaactgatggggggatgaaggaggaggggcagagagaggacccggcaagggaaaccaagggaaggagagtggagagggtgacagggcacaaagagatggagcagagaggaagaggagcaaacagcagaggttgcaaactcctctgtctatggagcccagcagggaagatgatcccgatgctggttagaggggagagtggggagtggtggccctttgcacctgagcacaacccacagttatccagggggaagacgattccaaaagctgacagtctagatttttatgcaaaatctctaatttaaaaaatgttggcaacaaattaaacatgttgaaagcactgggggaaaataaccctcttgggccgcccggaggaccccaggtaagtgagtcctcagggatgtggggagagggagccacggggaaggagcaggggaggcggggaggcagacaggctggcaggaacagcagcagaggtgagggcgagtgacacagagggacaaagaagggaggcacagagagcggtgtcgagcagagacagaaatagaggcaggtttcacagcagatggggtgggagagggaaagactgatgaatgagtccacagactagacggatgggccaggtcagcaagacattgggggctgggagggcaaagggtcagtcccagggaagatgaggggagatggagaggcgagacggcttgacagagacaggaggtccaggtgacacctcgagacagatgcccggccagagagagtggggtgagaagggatgaaatgcagggagagaggatggagagagagaaccagtgtgagctacacagcaggtgtcctagcaggtgagacaggtgattgagggggtggggaccctggcaagaaagcagggccagggttccggaagggactgaggattcagcggccacccccgcccccaatccccaacccacagcacctctgcctgaagatcggcctctctgcatgggccctgagggtgtgtgtgcaggcacatgtgtgcacaggctctgcttgtgagagatgccagcgccctctgatacctgatgtcttaattctgctgacctctcggacggcgaggaggtccctgaggagccccgtggcgagaggaacactctcagggctgtctctgagtgggattaagggtgactgctggatggggctggccctccctgcagtgcacacacgtgcctccgacgctggcactcggtttggtgtgtgcgccacagtgcacagctctgtgactgtcttagcggcacctggggctgcatctctgtagctctggggccacctccgtgccttttgccttgtgtctgtccgtaggcgtgaggccacgaggccacaggaccacaaggcaagggcctcctgcctttgtctctccctccaggtctgtgtacgaaggactgtgtgtgtctctgtgtgacacacgactacaggtctggggactgctccctgtctctcctgaccactggctgactgagtgtgggggctgcgtctgcaactgggcctctctggttccatatcggggtctctggctgccagtgaatgactgtgtgctctcgtgtgtgtgtgtgtgtgtgtgtgtgtgtgtgtgtgtacctgccaggggaatctttgcctccacgtgccccgtgtcttcctcgcacgctcccactctctgtcgctgacttgctgacttggggtccctctgacaagtcagaagcggcctctaatcccccagaactctggtggccagtgtcccccggctccctgctggccccagcaggcaccccgcgggtctgtcccaccctccctgagtctgtggctccctgcgtctctgcctcacccgcgtgtctgctctctgggtgggagtggcgtgtgtccccggctccccgactctttctttcggaaattaagtgagtaactccgtgactccgtgctgatgccctaattgcctgtatgtgtgtttcggaggctgggtcccttctctccctctgtgcctccctccctggctcccactcttcccttccttgggtctctctccccgcctttcggcggcttcactctctgtccctcatttctctgtgtgcgtttggacaatccggtggccaggaggagaggagccccagggaggaggaggaggaggaaggtgggaaggcgaagtggaggctgcggaaaggcaggttagaaggcgaaggctgcggaagatgctacaggaagagggaggtgcggtcctggccgcggtccgggggtggggggcgggagttttcaggctcctggaccaggagggaagccggctccggctactcccagctgcctggagcccgagttcctgtctggcggctgcgcggccgggacttgggatgtgaggcgcatagcaatggggcgctgcggaggcgccactgcagctcccagctggagaggggggcggggagggggccgaggggcagccccgaggctcccttccccctcccccttcccagctgggctctccccaggggaattccccaccccgacagaaagtcaccagaggctgcggggagggggcagggaggaggggagggcgcctaggaggagagcagaggtgaggaggtctggggaaggagatgggggtgcagagaggaggcgaaggggtggaggggtgggcaagaggccatcctgggctctggagactcgagtcctggagagagactggctgggcccctggcaggacaggaccccagggaggcaggggcatagagatggggggaaccctgagagcccgggattgatggtgagttggaaggagaggctcccaaaaggagagagctaggattgggggggtctgagactggggagtactatggggtgaggagacaacgatggagggggtctctgggtgatgaaaggtcatagaaggatgtttcagagagtgatgggctaaggagaaggcgactgggggtgttggggagaaaggggagaggctggggtgcaaggcccaaagaggggcggggagggagtgggaggagggagctagaggagagggcggctgaagtgagggtctcctggacagaaggtctggagagggatatctgggggattgtcagagatgggggttagagaaggctgaggagcagatgccgtgtcttagaaggtcctagaagagcaggtgtgagggtcggaagcctggggaggaggcagcaaatggggggcgggggtctccaggaggagaggtttccaggaggggagggcggagggaggtgggagaggcagtggtcctggagagacacgtgcccaaggatagaaggccccaaagcctagtggggtcagggaacgggggtcttggagagacggaggggcaggggtccgagccgcccaccaggagaggcggggtgaccccagagggagaagggctgaagactggggagggggttgtctcactccccaatcaccccctccgtctttcccattttcacttcccaaactccccggttctccccggttgccacggcaaccgctcttgccaggcgcggtcaccaaggaaaccccgtgcccgcctctcccccctccccatcactggcgtgccccccccaccccaagcagcagcggtgtggagggtgggaggggccatggggagaggaagaacctggactcccgccccagaaaggggggcccggacctacgcccggagagccccccaccctaagcctacttcctcagccccacagctggatacgcagcgaccgccggacgcaccccccacaacctgtccccaggcagcggcgacaaccaccccccccacagcacagaactcgccctgcccggagaacccccacccagtcgcctcccccaccggcttctgcctcccattaggccccgccccctgtcctctgccatccccccccatcccggaggaggcctaagaccactgtcccccaattagcgaatgccccccacccaccccccgcggttccgcctccggcccccgcccccgacccgtgccccttggcggctactcacagcgaggagaggggttccttccggggggcagcatgcccggcccgtggggggaggacccccccaatgaggctcaggaatttggggtgcaaggcccgctgcggggaggcgcggggggcggggctgcggccgggcctggagcctctcgcgctctcccccctccccggctcctgggtggggagggggcttccgcagcggcggcggtggggctgggggggccgctctgcctcctcgcctcgcgcccgcctgccgtccggccccgcgccctcgcccgccgcccgccttccttcttgccttcctttctttccttctttctttcctggcttccttccttccagccttccttccttccttcctccctcctcgggcccgccggcgccgctctccccccaccccacccccccccaggccccggccccggccccggcccccgcctcggacggtgcggcagcgaccgagagcagccgagagcggcggagacgggagcggaatactgatgatggtgggagcgggcgggcggagggagggagcagggagggaggcccgggaggagaggaaggggggagagagggaggggagggagggcagcgtggagagggaggaaggaaagaggggggaagaaccggagaggatgggagagggagggaagaaaggagagggagacgggagggaaggggaagggggggaggaaagaagagggaaggggaggaaagaaggaaggaagtgggaagggggtggaagaaagaagagggggagaaaaaggggaggagcaggggagagaggagggaaaggggagagggtgtgggaggggaggggagaggagggggtaactcctgcaataaggtcctggatgaaggggaggggagggcggggggcagggggagtgggtagaggaagaggaaaggagggagaggaggagtggagggggagatgggtagagagatgggcaggagaggcccaggggcagggaagtgaggggaaagaggaggtagggaaggcctaactttgagggctgcaggggacagaggggcctggagggcggcgggggctgtggggagaagaatggggggtgcggtgtgcgttgtcaggaagagcaggggaagctggcaggacccggaagaggcaggaggatctaagtgggacagagatgagaggatggaagagggagggaaggacccgtcggggggaggggggaggagaaagatctcgggggagaggagagaagctggggagctggagctttgagggcccaagactgggtggcaagagcccggggagtagacagagtgggggaggggacagagggcctttcttgaactccgctgtatgcccgcttcgtccgcccctccacctcatgaagagaagaaccttcaaacccattttccagaagagaccactgagctcttggaggagccaggatggggtttgaatgcagtcttgggctgggggtaccctgagggagatggagaatgggtcagttcctagctttcgtccctggtccagacttggcaggtggaggcacctgggaggggcagagggcacagcctgcagcctccctactcactctcctctcacctcccccaggtgttggcagcgggtgctggggacgcatttagagctgtgaagctgagctgcatcttgggtgcagggagggggagggcagatgcagaggcctctgggaggtcaccgtgaccctcccctctacctccccggtccactaccccaaaagcttgggccccaaggaagggggacatcgggaatcaggggcggagaaacccagaaggaggggtggcccctgtccaggacactgaagatccttccagatgttaaaattagcacagaagtttcacccctgccttgttatcccccaaaacgctgactaataactgaggactcaggagagagagaagaaagatgaaggttccttctttcagtgccaggggacccgggacagactctccctcttccccttctcctcggagagccccagggagggaaagtgtggctgtacccctgcaggcagagcctggggagagtcagggttggaagctggaaggaaagtgggccagacacatctataatgagccagggttcccgagagaagccaggtcacagatgggttcggaagaggcggttttgggtgggcgctggtgggtgctgagccctgagagctgccgagaggggaaactgagaaggggctgggcgagggccagggagtggcaggtggctgtggtgcttcgggtttcacccgcccctggcgccgctcaagtctagttcgtgagactggaccagtgaatgtgtgtgtgcaccagggtccagcacagagtaggccaggaccgatggtgataccagcaaaacagaatcacatggtggcagcccgcggttcctcctggtctcccacaggccagatgctgtgcccagcacctcacaagcgtggcatcaatcctgcaaccatgcggtaccaactcctagggatggtggtacctggtgggcacaggtgagagcaggcccctgatgagccctgagttaaccctttcattacaagagggtctcggccgggcatggtggctcgcacctgtaatcccagcactttgtgaggccgaggcgggaggatcacttgaggtcgggagttcgagaccagcctggccaacatggtgaaaccccatctctactaaaaatacaaaaattagccaggcatggtggtgcgcgcctgtaatcccagctactcgggaggctgaggcacgagaatcacttgaactcgggaggcctccagaggttgcagtgagccgagatcacgttattgcactccagcctgggtgacagagcgaaactcagtctcaaaaaacaaaccaagagggtctcaggtgagaggccaagccgtgtcaggtggggccgttagagaagcagggaagtattccaatatttgaacaaccagcgaaccctcttggtccatgcagcctaagtctcagccctgcctggagggtatgactgcccctgttttactgaaggagaaatgatttgccgtcaacctccagagctcatcaagggtcttcagcaccgggcactgttcagggctttgagagcccggccggagaacagtaaggagacagcccctgtccccgtggaactgacccctcaaggtcctatttccaagagcagtgtgagcaatgaagaaaataagaggacaattagggaggagagaagttggtgggcggtcaggaggacagacttgaggtgatcaggggaggcctcctggaggaggtgtcttttgtggcgaggccaaaataaggagatagctcattgcgtgcacaggggcaagcacctggggcagaggcccccagatggcagcaagccgggcccgtttgagagatgggagccagataggtgtggcgtggaggaagaagagaagcagagtggaaaaagatgaggatgcggccccaggtttggctcaaacacaaaaccaaatcttaacgcttcccactgtcccctaaaccttgccctaaggcttaactctaatctcccactcaggtgactgtcctgagcaactggaacactgatcctcagttttgattcatgttgtcaacatggattggggactctgatgtcccagaaatggtattaggtaagagacagggacagtgaccctccacagtaatgagtgctcaaaggtattttcaccatttcaaaaaataaaaccaaaaaacaaaaacagacaaaaaaaaaatggaagttgtacatttccttcgggatgggatttcagaggttaaatttcaaatttctttgcttcaggctgtaaaaaaaattatccactcagtgtgttcactgcctgtctcaccccaatcagaagctatgatcggcagtttggtatacctttgataaataaaatatgggaaaatgaatgaacttttcacttaatgtagtttggtttgctcagaaaaatctctcaaagtgggactcatgggggacaatggctaaaggaatcacagccactcagatgttcctgttatttagttccacacagttgcactggacaactcccaggcacctttcacctgggctgtgatataacaagactgccacccatgataggaagctatgggaaggtggctcgcaccaccatgggtgctaagctgcttggccttatgccttaccccaattctccttttttattttttttgagacagggcctcgctctgtcacccaggctggagtgcagtggtgcgatgttggctcaccgcaacctccacctcccattctcgtgcctcagcctccgagtagctgggactacaggcgtgcacaaccatgcccggctaagttttgtatttttagtagagatgggggtttcaccatgtcggccagactggtcttgaactcctggcttcaggtgatcgcctgcctcagcctcccaaagttctgggtttacaggcatgagctgctgtacccaggcccttagccccaattctgaccatcactaactgctatgatctgaatatgttcccccaaaattcctatgttgaaacttaattgccaatgtgacagtattaacaggtgggtcctttatgaggtgattaagttgcaaggatagagccctcatgaatgccattagtgactttatttatttatttatttattggagatagtctcacgctgtcacccaggctggagtgcagtggcaagatctctgctcattgcaacctctgcctcccgggctcaagcagttctcgtgcctcaacctcccaagtagctgggactacttgcccctgctaccaagcccagcttttttttttgtattttagtagagatggggtttcaccacgttgcctagggtgtcttgaactcctgagctcaggtaatccacccatatcagcctcccaaagtgctatgattacaaccatgggccaccacgctcagctgcattagtggctttataacagaggtttggccaggcacagtggctcagacctgtaatcgcagcaatttgggaggccgaggtgggaggatcacttgagcccaagagtttgagagcagtctgggtaatacggcaaaacccataaaaaatacaaaaaattagccagtatagtggcatgtgcctgtagtcccagctactcaggaggctgagatgggaggatggcttgaacctgggagttgctggttccagtgagctgagatttcaccactgcactccagcctgggggacagagtgagatcctgtctcaaacaacaacaacaacaaaacaacaaaaaaacccagaagtttgagtgagctatattcccttttgctatgtgaagacacagcaagaaggcaccatctatgaggaacagctcttctccagacactgaatctgctggcgccttgatcttagaattcgcagccttcagaactgtgagagaaaattcccattgtttataaattacccaatctaggctgggcgtggttgttcacacctgtaatcccagcactttgggaggccgaggtgggcggatcacttgaggtcaggagttcaagaccggcctggctaacatggtgaaaccccatccatctctactaaaaatacaaaaattggctgggcatggtggcaggtgcctgtaatcctggctactcaggaggctgaggcaggagaactgcttgagcccaggaggtgtggaggttgcagtgagccaagattgtgccactgcactccggcctgggcaacagagcaaaactctgtctcaaaataaataaataaataaaattacccaatctaaggtatttttctgtagcagccccaatggacgaagacactgtgcctctattccaaaccctaaccctcactgttaggagagatgagtggccactgaaatagaagcacagagctgggtgctccatcctcacagcatggtaacatccctattgcccgcttgtctggtttccagaacgtctgtatttgtcctgagtcagtgtgacaggctacatttcctgaagatagctgtaatcatcgccccgtccctcaggctcttcttacgatgagactgacactttcccctgtctcatcccatcaaagtgctgattggcagtgaggtataccttgataaataaaagcccttgaaaccgggagggcttttgtgactttttcacccaatggcctgtggccgccaaaaagatgtagcttctgttttatttgctaaaatattaactccagcctttggcagctctatgagctgactgactgccccgaggtagttacgccgtgaggcggctcagactaacctgatatagttgggtatttttttatttttttttattttttgaggcggtgtctcactctgtcacccaggctggagtgcagtgatgcaatcatggcttaccacagccttgacccaaggggttcaagtgatcctcccacctaagcctcccaagtagctgggactataggtatgtgccaccacacatgcctaatttttaagctttttgtagagatggggtctcactatgttgcccaggccggtctcaaattcctgggctcaagctgtcctcctgccttggccactccaagtgctggcattacaggcatgagccacacctggccaagtttagatacttgtcccttccaaatctgatttagaaatgtgatccccagtgttggaggtggggcctggggggaggtgtctgggtcccagaggcagaccccctcatgaatgtcttggtgccattcctgcagcaatgaatgagttcttgctctattagttcactgaggtctagttgttaaaaagggcctggcgcctccctcctcactgtcttttttgctccttctctcaccatgtgacataccagcttcccctcgcctttcaccctcttctatgattgaaagcttcctggctgggtgcagtggttcacgcctgtaatcccagcactttgggaggcggaggtgggaggatcgcctgaggtcaggagctggagaccagcctggccaacatggcaaaatcccatctctactaaaaatacaaaaattagccaggcgtggtggcatgcaccggtagttccagctactcgggaggctgaggcaggagaattgcttgaacccaggaggtggaggttgcagtgagccaagatcgtgccactgcactccagcctggatgacagagcaagactccgtcttgggaaaaaacaaaaacaaaaacagagcatcacttacgacgttttcttgccaagagcatttaaagtaaatctaattaagccccaagacctatggttcccaaactagatgccaagacaccctggggggactacagcaaattcatagcaggccacagcagtgccatgcaggtaaacgtttaccagccggttctcaacattcgctagagaagagtcgtattttttttgcttctgtttgcaaagccaccattcgctggctccagcacacaactggttacagcatctttaaatttttcaagtgaaacacagtgatagttgacatctctcagacaccaccatgacctcatggcttgggacagtccacagtttcaacattagattatgctacatttgggggatgatattatctctgtaaagctgagtttttggcagttccatgattaaaagcaaccactacctgtttgtggaacaggaaaggagggtggtagtgtccaatctgattccaaagtgtgataggttgtacagtgcccaacaggtgcgtatacccttttagtaagtaatcagtgccctttaagactgaaataaaggccgggcacggtggctcatgcctataatcccagcactttgggaggccaaggggggcagatcatttgagaccaggagttcgagacaagcctggccaacatggcaaaacccgttggtgaaaccccgtctctactaaaaatacaaaaagtagccaggcgtggtggcgcacgcctgcagcctcagctactctggtgcctgaagcaggaggatcacttggaccccagaggcggaggttacagtgagccgagattgcaccactgcactccaggctgggtgacaaagcaagactctgtatcaattaaaaaaaaaaaaggatgaaatacaatattttttctttcaatttgtgtgcattactttttcaactggtgctaagttgctagaacataatacttcttaagttgtgtgaacataactgcttaataacggccaccacgtatttctttttgggtcagggacaccatgagaaaatgactgaggtgctgtgaactgagaatgtgggggatcctctgcacgagctctcttgtccatctacaggaattaggagagagaaacaagctggaagacactgcgaaggaacaatcaggcaaatctagaatgtggggcattctaggagacaaccagcctggtccctccaaaaagtccccatgatggggcagagaaactggctggagtggttgctctaagttaaaatagattaaggagatacaaccaccacatgcagtgcttgagccttgcttggatcctggtttgcaacatttcttttttctttttttttttttttgggagtgggggtctcacttttttgcttaagctggagtgcagtggcacaatcatagctcactgcagcctccaactcctgggcttaagtgagcctcctgccacagccttctgagtagcggggattacaggcaggtgccaccacacctggctaattttttgttgttgttgagatggagtctcgctctgttgcccaggctggagtgcagtggcatgatctcagctcactgcaacctccaccttccaggctcaatccattctcctgcctcagcctcccaagtagctgaaactgcaggcgcacaccactatgcctgggtaattttttttcttttgtatttttagtagagatgaggtttcaccatgttggtcaggctggtcccaaactcctgacctcaagtgatctgcccgcctcagcctcccaaagtgctgtgattacaagtggcagctactgcacctggctaatttttaaacctttttttttttttttagagatggggtcttgctatgttgcccaggctggtcttcaactcctggcctcacgtgatcctcctgccttggcctctcaaagcactaggattatagatgtgggccactgtgcccagcccatagtatgttttaaaagtcctaaaatacaatgtctggacaagtgggataatgtgaatttggactcgatcttagaagcactagggaattaagtttactcttcttgggtgtgatatgatataatattgtagttatgtaggagaatgttcttattcttttctttcttttttttttttttatttttgtttttgagacaaggtctcactctgttgcccaggccggagggcagtggcacagtcttggcttggtgtaacctctgcctcccaggttcaagccatcttctcttttcagcctcctgggtagctgggactacaggtgtgcaccaccatggctggctaatttttgtattttttgtagagtttcatcatgtttctctacattgcccaggctggtcttgaactcctggccacaagcgatctgcctgtctcagcctcccaaagtgctgggattacaggcatgagccaccacgtctggcctagaatgttcttatcttaggagattcgtatggaagcatttgcgtctgcaacctcttctcaaatcattcagcatctcaaatattaacaacgatggaatcaaagcggtgggcatatggatgctcaatgttttttcaactttctggatatatgacatttctcataaaaaatttgggggagattcatctgagagaagtcacatttagggcaggttgttgcttgcaattaaccactcccctcctgcataaacgcttttccctgtctgcaccagcatttaagatttccccagtatctcccatcttaaagaggaaccaccccatcatgccctcctctgacacgtctccctgcagtgaccgcccacttctcttgttcttctcagcaaaacttcacaaaagctacctctccttcttcatctcatagtccctctgcaaacaccagctgggcttctgcatcccacttccgaccaagctgtccttgtccaaggccaccaatggcctccgtactgcacactcaatggccacttctctacccgcatcccagtcttccacttggcagcactggccacagaacctcctggaaaccaatgtcttttcatggcttcagtgacttcaaaccctccctcactttcctcctctttcacctggctgagccttctgggacttgtctgccagttcccctcctttgcttgctccctaaatgtgggaggaaagccactggatcccagccctctttgtgctctgttctctacccctaggtgacccagttctgtggctttaaacccagacagccgggccgggcgtagtggctcaggcctgtaatcccagcactttgggaggcagaggcgggcagatcacttgaggccaggagttcgagaccagcctgaccaacatggtgaaaccctttctctaataacaatacaaaaattagccgggtgtggtggtgggcgcctgtaatctcagctactcgggaggctgaggcgggaggatcacgtgaacctgggaggcggaggttgcagtgagccaagatcgcaccactgcactccagcctgggtgacagagtgagaccctgtctcagaaaacgaaacaaaccaaacaaacaaaaaatccaggcagctgatgactccccagtatgggtgtccaactctgaactctgcgccgagctcctcctgcaggtatacaaatggctccttgacatctcttcttaaatgtagcggccaaagttgggctcctgactcccggcccctgcccacacacacttgctttgcttccagtcttccttatctcagtaaactgtaccatcctccactcagctgttgacttcaagacgtagaaattgttctcgatggcactcttttctcactccctctgtccagtccatcatccagtgactctacctttaaaatacatttccaagtatcccttcttttcatcccttctggcaccacggtagcaaaagccaccatcctctctcccatggccgactgaaggcctcctccctggccttactgctttttttaattgttgttgtttttgtttttttgagatggagtctcactctgtcgctcaggctggaatgcagtggcgtgatctcggctcactgcaacctccatctcctgggttcaagctattctcctgcctcagcctcccaagtagctgggattacaggcacctgccaccacgcccggctaacttttgtatttttagtagaggcggagtttcaccatattggtcaggctggtcttgaactcctgacctcaagtgacccacccatctcggcctcccaaagtgctgggattacaggcgtgagccaccatgcccagcctagccctattgcctttgctcttgcctccctacaatccattctccacacagcagccagggtgaaacttgctgaaaaacataatcagggccgggcgcagtggctcacacctgtaatcccagcactttgggaggccgaggcgggtggatcacgaggtcaggaggtggagaccatcttggctaacacagtgaaaccccgtctctactaaaaatacaaaaaaaggccgggcgcggtggttcacgtctgtaatccagcactttggaaggccgaggcaggcgcatcatgaggtcaggagatcaagatcatcctggctaacacggtgaaaccccatctctactaaaaatacaaaaaattagccgggcgtggtggtgggcgcctgtagtcccagctactcgggaggctgaggcaggagaatggcgtgaacctgggaggtggagcttgcagtgagccgaaattgtgccactgcactccagcctgggcgacagagcgagactccgtctcaaaaaaaaaaaacaaacaaaaaacaaaaaaaaaagtagctgggcgtggtggcgggcacctgtagtcccagctactcaggaggccgaggcaggagaatggcgtgaccctgggaggtggagcttgcagtgagccaagattgcaccactgcactccagccggggcaatagagcaagactccatctcaaaaaaaaaaaaaaaaaagaaaaacgaaatcagatcacattaacctccaacttaaaatactcggaggacttctcactgcatttgggattcattcctccttcccatgactgctaaagtcctgagcggtctgggccttgatgctgccccaccctcacctcccacctctccccactccagcttctccaggacagtgtgctcattcctaccacagggccttggcacctgttcctctctgccggaacgctcttctcccacatcgtcacatgctggcttccgattttcaggtttcagttcaaatatcacctcagaggggccttccttgtcctgctgatttagagacactctcctacctgttcttggtaactctttgcaacacaattgtgttctgttttcttcacagctctcattgataactgaaattttcctcttttcttttgcttccttccttcctttctctctctctttctctcttttttctctttcttttctttctctttttctttctttctctctctctttctttctttctttctttcttcctttctctctttctttctttcttttttgagacagtctccctctcttgcccaggctgaagtgtggtggcgccatctcggctccctgcaacctctgcctcccagcttcaagcaattcttgtgcctcagcctcctgagtacctgggattataggcgtgtaccaccacgccaggctaatttttgtatttttagtagagaaggggttttgtcatgttggccaggctggtctcgaactcctgacctcaagtgatctgccctccttggcctcccagaatgctgtgattacaggcatgagccacggcgcccaggctgaaattttcttcgcttctttcctttctactcactgtcttccctcacttgaaggcaaactccatgagaacaaggacctggtctattttcagtgatgactacattcccagtgtctggaaaatgccaggagaactgagtattttcatggaatttgtggaattttacatacaatccatgcaggcttctctgcactttaaatacctttcctgaaacagaatcatccttccccataacaaaacattaattgttcttgttggtctgccatgcatgagataagtgcttggattacctctgaccccaccaacaatcctgcaaggaaggtgctattaatatcctcctctccactttacagagaagactcaagtgcaaagagctgaggtgcttacacaagaccaccgcacaggaacgaagcgtcggagtgtggaatcgagacctgttctactgcactccagagcacatgttctttctactctgccataatgtttgggacaaaattgaatcatgagggtttttttcttccattacaaatgtaacacatcgctcctgcgtacggctgggatgagtcactggcaccagacgtgccctcctgcaaaaaacagctatgaaactggacaaaatacaggagggccactgttttcaggcgttgaacagtggaaagaggactgcgatccttgagaagagacgatggtgaaggtgagcccatgtgttggcccaggttcctcactgggagccctgtccctaccacagcacagagatacggggctaaaacaatgcagttgtttttttgtgttttctcttctcttctttctattatctttttttttttttgagaccaagtctcgctgttacccaggctggagtgcaatggtgtgatctcagctaaatgcaacctccacctcctgggttcaagcggttctcctgcctcagcctgtcaagtagctgggattatagactcgtgccatcatgcctgggtaatttttttttttaatttttttagtatttattgatcattcttgggtgtttctcggagagagggatgtggcagggtcatacgataatagtggagagaaggtcagcagataaacacgtgaacaaaggtctctggttttcctaggcagaggaccctgcggccttccgcagtgtttgtgtccctgggtacttgagattagggagtggtgatgactcttaacgagcatgctgccttcaagcatctgtttaacaaagcacatcttgcaccgcccttaatccatttaaccctgagtggacacagcacatgtttcagagagcacggggttgggggaaaggttatagattaacagcatgccaaggcagaagaatttttcttagtatagaacaaaatggagtctcctatgtctacttctttctacacagacacagtaacaatctgatctctctttcttttccccacatttcccccttttctttttgacaaaaccgccatcgtcatcatggcccgttctcaatgagctgttggggacacctgcagaaaggctgtcacttcacacttggaagattgcacagcggccaggcagaggcactcctcacttcccagacagggtggcggccgggcagaggggctcctcacttcctagacggggtggccgggcagaggcgctcctcacttcacgcctggataatttttgtatttttagtagagacggggttttgctgtgttgccaaaactggtcttgaactcctggcctcaagggatctgcccgtctcagcttccgaaagtgttgggattacaggcgtgagccaccgtgcctggcccagagcagtcttactgagccgaggagacagagagagggctctgggggctgctgacaaggctggaatttgcaggatagggcagtggggaaaagggagccgcatgaggtgggcccccagaagcctgtgtgtagttcaccataggtccttggctaaggactggacggtgtctgcagaggacaagactccatgagtaccagtcgggggtagctgctacaaagatgagagatgaacagaaataaaagccgtcatgcagcgctaggagatgagtctccagcccagccagagtgggagggcctcactaagctcctgggcactcagctgaaagctcaggaaggccatgctttaggagtaaggccctgacttaatattctgttgagtggatacagcatggttaatttaaccattcctttctagttggatactctggtaattttatttttcaaaaactaggcctggcatggtggctcatgcctataaccccagaactctgggaggctgaggtgggtggatctgttgagctcaggagtttgaggccagcctggctaacatggtaaaaccccgtctccactaaaaatacaaaaattagccaggtttggtggtgcgtgcctatagtcccagctacttgggaagctgaagtaggagaatcgcttaaacccgggaggtggaggttgcagtgagccgagatggtaccactgcacccatccagcctgggtgacagagcaagactctgttcaaaaaagaagtaaaaataaaaaataaaaataaaggccaggcacagtggctcacacctgtaatcccagcactttgggaggctaagatgggcggatcacctgaggtcaggaggtcgagaccagcctggataagatggcgaaaccctgtctctactaaaaatacaaaaattagctgagcatggtggcacgcgcctgtagtcccagcttctcaggaggctgaggcaggagaatcgcttgaaactgagaggccgaggttgcagtgagccgagatcacgccactgcactccagcctgggtgagaagagcaagactccatctcaaaaaaaaaaaaaaactattataaaatatcaccatgaacctctttgtaagcttctgactttcaggtgaattcccaggcatgggatattttcagggtatggacattgttcctgtatttgacacctttcaccaatttgctttccaaaattgtggcaatttaccttctgacaactgagtatcagcatgcatgtctgtttggctgcactctctctagcatttggtagaagcttaaaacatttgttgctcatttgatgggcagaggaaggaatcactgagctgttgtaatgctatgcctttgggctttataaaaggaactaaatgaaacagttaatgtgaaaattgctttagcttctgcagaaaacttttgttaatgacccagcaattcaactcataggaacttatattcaggaagtcatcagagaggtagacaaaaatatacacacagagatgtatctcatagaatcatttattatagccaaatctgaaaaaaacttaagtgttaatggagtacatgtgatctggggatgctgctttacctgtagcctgttttcatttcactcctaagttatttatttattttatttatttttatttttattttttatttttagagacagagcctcgctctgttgcccaggctggagtgcagtggcacaatctcagctcattgcaacctttgcctcccaggttcaagcgattctcctgcctcagcctccagagtagctgggactacaggccggtaccaccatgcccggctaatttgtgtatttttagtagagatggggtttcaccacgttggccagactcgtctcaaactcctgacctcagatgatctgcctgactcagcctcccaaagtgctgggattacaggcgtgagcttctgtgcccggccctgccatattattattattattattttgagacagagtcttgctctgtcacccaggctggagtgcagtggcacaatctcagctcactgcaatttccacctcctgagttcaagaaatcctcccacctcagcctcctgagtagctgggactacaggcgcctgccaccacgcccagcttatttttgtatttttttgtagagatggggttttgtcatgtttgccctggctggtctcaaactcttgggctcaagccccctgggctcaagtgatccagccgccttggcctcccaaagtgctgggattataggcataagccaccatttctggccactcctgccttattgactaataattttattattattattattgttattgagacagagtctctgtcacccaggctggagtgcagcggtgcaatcttagctcactccaacctccacctccttggttcaagtgattctcttgccttcgtctcccaagtagctgggattacaggtgcccaccaccatacccagctaatttttgtatttatggggtttcaccatgttgcccaggctggtctcgaactcctgggctcaaatgatctgccctcctcagcctcccaaaatgctgggattacaggcgtgggcaaccacacccagccactcctgacttattgactaataattttattatttttatttttttgagacagagtaacctataattttagcacttgggaaggccagggtgggaggatagcttgagcccaggagtttgagaccagcctgggaaacatagggagacccccgtctctgcaaagaatcagaaaaattagccaggcgtggtgatacgtgcctgctcaggaggctgaggtggaggatctcttatcggtgacaggctcttccacctggtactttccctctacttcgtgctgcgttttggctgacaatagccttaagggagaggaaatcaatatatattccccccataggactggcaaaaccaaagttaactggtgtagtaagcattgatgagatgggctgggccagtggctcactcctgtaatcccagcactttgggaggccaacacaggcggatcacttgaggtcaggagttccagaccagcctggccaacatggtgaaatcccgtctctactaaaaatacaataattagctgggcatagtggcaagcgcctgtaatcccagctacttgggaggctgaggcaggacaaccgcttgaatccaggaggcggaggttgtggcgagctgagatcgcacagctgcactccagcctgggcaacagagagaggctcagcttaaaaaaaaaagcactgatgaggatgtgggggaacaggtcctctgtcccattaccagcagaaagaaaatcaggctgggctcagtggctcatgcctgtaatcccagaactttgggaggctgaggcgggtggatcacctgaggtcaggagttggagaccagcctggtcaacatggtgaaaccccgtctctactaaaaataccaaattagctgggtgtgatggcgggcacctgtaatcccagcaactcgggaggctgaagcataaggagcagctgaacccgggaggcggaggctgcagtgagccaagatcgcgcctttgcactccagcctgggtgacagagcgataccctgtcacaaacacacacacaaaaagtgaaaatcagtatgtctaccaatggttccacacccttgccacggcctcatcgtgtatgtggggtgcttccttgccctttaactctgcacagttgacttgacttgacttgctttggccaatggcatgtgggtggatgcaccagcgtctgagtctaggctttcagaagccttgcatctgcctctagtccgcttgtgccccagccgtcaccacgagacgctctccctggcagcctaccttctctcaacctgggccccagaatgagatgcttggagcggacctgagccagccagacctgcagcttcaagcagagcagccctagaaaagtctggctaggccgggtgcagtggctcacgcctgtaatcccagcactttgggaggccaaggcaggtgaatcacttgaggtcaggagttcaaaaccagcctggcgaacatatagtgaaaccctgtctctactaaaaatacaaaaattagccaggcgtggtggtgcattcctgtagtcccagctacttgggaagctgaggcaggagaatcacttgaacccgggaggcggaggttgcagtgagccgaggttgtgccattgcactccagcgtgggcgacagagagagactgtctcaaaacaaaacaaaacaaaaaacaaataaacaaaaaagcagaaaagcctggctagatcaagaacacatgaagttgctgagtttttggtatttgttatgtagaaatacttgacagttccaggaattgtttattaaaattaaaatgaatacattcatataacttgataattctaactctccttattagacatgtctccaaggaaactcatgtaaagatgttcatagcaacattgtttgtaaaagcaaagaaaccaagaataacccaaatgtccagcaagaggagagcggacaaagaaacgccgagttctatggaatactactgcagcttttaaaaggaagaggacaagctctttaaataaatctggatagatttccaagacatattgttgagttaaaaaagcaagctgcagaacaatatgtacagtaggatcccatttatgttaaaagacactcatatgcttgctcaaaacaatactactcatttactatacaatactatgcatatactctattaccacacacgcacacacatgcacacacatgcatgcacacacacacatgcagcatgcactcacttttagacaaagatccagaaggatcaaccataaaccaataatcatggttacttccagagaagagatgtagatgagagagaggtgaccaaagggaattttagctttgcctgtaagctttttttaagaagcaaggaaagtctatctgtatattatttgtacaatttaaaagtaattttccttttctttttttttttttttttgagatagggtcttgctctgtcacccagactggagtgctgtggcatgatcatggctcactgcagcttcaaactcctgggctcaagtgatcctcccatctcggactcctcggtagctgggactacaggtgagcgccaccatgcccagctaatttttgcttttttttttctgtagagatggggtcttgccatgttgtccatgtcggtcttgaactcctgggctcaagtgatcctcccacctcggcctcccaaagtgctgggattacaggtgtgagccgctgcgcccagcctaaaaataattttgtaaaaggaagaaatatatatgaatatatacatccatgcatactatgaatataaacatagggccttattttaaatgtcctttgtggcagacaggcctgaattcaaatcctgctactgccaccagctaactgtgtcactagacaagtccattctttcacttggaacctctgtttcctcatatgtaaaaacggggatactcatttatatttaatagggttgtcatcaaagtaaattataatgtttgtaaagttccaagagcaggctgggcatggtggctcacgcctgtaatcccagcactttgggaggctgaggtgagtggatcacctgaggtcaggagttcgagaccagcctgggcaacatggcaaaaccctgtctctactaaaaatataaaaattagccgggtatggtggcaggcgcctgtaatcccagctactctggaggctgaggcaggagaatcacttgaaacccggaggcggaggttgcagtgagccgagatcgcatcactgtactccagtctgggtgacagagtgagactctgtctcaacaaaaaaaaaaaaaaaaaaaaaaaaaaaaaaaaagttccaagagcagtgtctgacaaccagtgtatgttcaattaaatacgaattctttcccttccacttcccagtccctgctacccctaaccttgctcctaagccatgagtcatgctgtggtgactattttgtaggtgcctccttagcacttacattccctagggtaggcggaataattactccccaaagatgtcctcatccccagaacccgtgaatatgtttgattacatagcaaagaggaagtaaggcagctggcggaattaaggttgctaatcagctgacgttaagatagggaaagtaggccgggcgcggtggctcacgtctgtaatcccaccacttcggaaggccgaggcgggcagatcacaaggtcaggagatcaagaccatcctggctaacatggtgaaaccccgtctctactaaaaacacaaaaaattagccggacgtggtggcacacacctgtagtcccagctactcgggaggctgaggcaggagaatcgctcccagaacccgggaggcggaggttgcagtgagccgagatatgctgctgcactccagcctgggtgacagagcaagattccatctaaaaaaaaaaaaaaaaaaacgttagggaaagtatcctggagtacatagacatgctctatgcagtaagaatccttccaagtggaagagggaggccagaaggaaagaatcagaaaaacatgtgggacaatggaagcagggttagaaaaatgctacactgctgactttgaaaatggaaggtgctatcagccgaggcagcctttagaagctggaaaggacaattaaacagattttcccctagagcctccagaagaaatgcagtcctgctgccatcttgattttagcccagtgagacccatgttggacttctgaactacggaactgttaagataatgaatttgcactagatggcggggctcgttggctcacgcctgtaatcccagcactttgggaggctgaggtgggcggatctcctgaggtcaggagttcaagaccagcctggccaacatggtgaaaccccttctgtattaaaaacagaaaaattagccaggcatggtggtgggtgcctgtaatcccagctacttgggaggttgaggcaggagaattgcttgaacccgggaggcagaggttgcaatgagctgagattgggccattttactccagcctgggtgagaagagtgacactctgtctcaaaaaaaaaaaaaattgcattgctacggtagcaacaaaaaacaatgcaactttgtgtgtgtgtgtgtgtgtgtgtgtgtgtgtgtgtgtgtgagagagagagagagagagagagacagggtctcaactctgtcacccaggctggggtgcagtggtgccatctcagctcactgaaacctctgcctcgctggctcaagcaatcctcccacctcagcctcccgagtaactaggaccacagacatacacactaatacgcccagctaatttttgcattttttgtagagatggggttttgccatgttgcccaagctggtccgaaactcctgggctcaaatatccacccacctcagcctcccaaagtgctgggattacaggtgtgaccaccacacccagcccaatgcaacctttgattcctacaaaggcatctctatttttggtggcagaaacacctttctctccaaatagcccatgtgtccttcctggacatatctctttggatacactgggtcctctcagcttcagacagaggactcaggcttggttaatcagagaatttacaatctctggccatactgactggttcatggatggtcatgtgagcaaaactgggccaaagcagagaattaagccaaagttgctaagggggttggatgtgagcctgataatactgatggtcatatttccagcatgagggaacagcttatgtgaagcgaagccagtcagagggaatgaggactcagagatgcagaggcacattccccacgacatcgtttgagtgcttggatctagtcctgcctgaagttctaggctagccatgacttttcagctacatgagccaatacattcaataaatctcccacaattttttttttttttgagacagaatctcactctatcacccaggttggagtgcagtggcacgatctgagctcactgcaacctctgcctctgaggttcaagcgattctcctgcctcagcctccagagtagctgggactgcaggcacgcaccaccactcctggctatttttttgcatttttagtagagacagggtctcaccatgttggtcaggctggtctcgaactcctgacctccaacgatctgccgacctcggcctcccaaattgctgggattacaggtgtgagccaccatgcccggccatgaacctccttcttaaaattcagccaatttgaattggggtctgtcttttgcaagtggactaatcctttgagaatctgatgacagctataaattttttttccttgagaaaaacgcatgtggacaaacctttatatacaatttcagggaaacttttgacccctgaagtcaggccccagcttatgaagtcctgctgtgttccaggctgtatcgccagcaaggcatcaaaaaggagagaagagacagagtatcttcagggagcccaggatgcccagtccttctctccaatcctgaagaggagttttgatataggtcataaaccactggatcaaggaatgaaaggtgggagttctccgcgggaggcataaaaaggctctttgcgatcactgcactcagcctctttgagagaatctctcagccctacttttggaatctactgattccaatctacttttggaatctaagagcctctcttggatctctttcctggattatgattatatttctctttcccctctttccacacttggaagaacccaagatcagagtgacacagtacgtgcccaagatacacagcaaagatatgaagcgggttttgaattctggcctcgttagctcttttacacatagaaggtctttctttttctttcttttcttttcttttttctctctttcttttttttttttttgaggttaacagtggaggtttaataggttaaagagaaaagctctctctcctgcagagagggaggggctcccaagtgggtcatctggttccctggtgaaatgaactgggttttataggtgagcttgggtaggtggagtgtgatttacatagaggatgagagattggtgggaccaggtatgccatttgcatagcgtgccgagggaatcttttattatgcagatgggctctctacctggccagcaccatgttgcctgctctttttttttttttttttttttttgagatggagtctcgctttgtcgccaggctggagtgcagtggccccacctcggctcactgcaacctccacctcccgggttgaagcgattcccctgcctcagcctccccagtagctgggattacaggtatgcaccaccacacccggctaattttttgtattttggtagagacggggtttcaccatgttggccaggatggtctagatatcctgacctcatgatccacccgcctcggcctcccaaagtggtggggttacaggcgtgagccactgcgcccgacctacctgcttctttactgcacacgtggtcgacaaagaaaaggaaagatggagcctccatgttgaacatgcctggtccccaggtagctttttcctgttggcacagctgcctgcattcacctgagcaagctcctagcttgctttttatagagagtgtttcaatggcttccctcccctcttagaatacaaaagcaggatctcactgtggccaccgggccttataagatttgtcacttgtctctctgccctcgtttggagtccctctcaccgtcattcattaggctccttccagccatgttggttttctgtctgtccctcaaatgtgccaaacatgctcctttgtccctgctcctccctgtgcctacagccgatgctggataacctaagatgcagaccacaaacatgctcaagaaaccagcaaagtgtgggctcgcccaaattctttcttgaaaaaagtttcatattgtaaagaagtcatcatgggaaaaaacaaaatgtagattccttttttggcctatcatactctcgttgtcagattttggtattaaagttaggccagctggatcttccggctggttgctcctcctcctcctcctccttctttcttcttttccttcccccttccttcctgccttccttctttccttccttcctccctccctccctcccttcttccttccctcccttccttccttccctcccttcttcctcccttcactcttccctcccttccttccttctttccttccttccttccctccttcctcccttctctcttccctccctcccttccttctttccttccttccttctttcctctctctttccctccctccctccctccctccctccctccttcccttccttcctcccttccttccttccttccttcctcctttcttattcctttcttcaagacagagtctcgctctgtcgcctaggctggagtgcagtggtgcaatctcggcccgctgcaacctctgcctcccgcaatcaagcgattcttgtgcgtcatccagcatagctggaatcacaggcaggcgctactgtgcctggctaatttttgtattttgagtagagacagggttttgccatgttggccaggctggtcttgaactcctgccctcaagtgatcttcctacctcccaaagtgctggattacaggtgtgaaccactgtgcctggcctggaattatttcctctttaaatgtttagcaacatttagtgccagtgacactgtatggacccagaattttctttgcggttaatcttttaaaaattactgatttgatttgtttcatggttttggactaactgaatgctatattttatcttgagtcatttttggtaagttatagctttccaggaatttgtccatttcagctatattttaaaatttgttagcgtaaagttgttcttaataaagttccctcttaaaaattcctgatattggctatttgtgcttttttctttctctttttaatcactatcactggaggtttgactatcttactaggcttttcaagtaaccaactttggtgtagttgattatcctaactctatgtttgttttctatatgacttttttcatttttattattttttccatttccttatttttttggatttttttagttattctttttctaactccttgagatgaatgtatttagtgccatgaatttcccttgaagttctgctttatgcattcacgtttaaaaatatatagtttttttttttaccatacagttaaaagtgttttacagcttccattaggatttcttcattgacccaggagttatttaaaagaacattttttaatttgtgagaattttttttttttttttgatgaggtcacactctatcacccaggctggagtacagtggccagatctctgttcactgcaacctctgcctccccggactcaaatgatcctcccacctcaaccttctgagtagctgggactacaggcatgtgctaccaggcctggctaattctgaatttttttttgtagagacagggtctccccatgttgcccaggttgatctaaaggtcctgagttcaagtgaccctcccgcctcagccttccaaagtgctggaattacaggcgtgaaccaccacacccaggacatgagatttttatttattactattattattaatttttttttttttttgagacggagtttggctcttgttgcccaagctggagtgcaatggcacaatctcggctcaccgcaacctctgcctcctgggttcaagcaattctcctgcctcagcctcctgagtatctgggattgcaggcatgccccaccacgcccggctaattttgtatttttagtagagatggggtttctccatgttggtcaggctagtctcgaactcctgacctcaggtcatctgcccgcctctgcctcccaaagtgctgggattacaggcatgaaccaccacacccaggatatgagaatttttaaagttatctttttttttttttttttgaggcagagtctcgctctgtcatccaggctggagtgcaatggtgatctcagctcactgcaacatccgcctccccagcttaagcaattctcctgcctcagcctctagggtagctgggattacaggcgcctgccactaagcccggctaatttttagtatttttagtggaaatggggttttgccatgttggtcaggctagtcttaaattcctgacctcagatgatccatctgtcttggcctcacaaagtgctgggattacagatgtgagccaccgcgcccagcctaaagttatcttttttttttttttttttttagagacagacttttgctctgtcgcccaggctagagtgcagtggtgcgatctctgctcactgcaagctctgcctccccggttcacgccattctcctgccttagcctccggagtagctgggactacaggcgcccgccaccacattagccaggatggtctcgatctcctgacctcgtgatccacccacctcagcatccacccacctcggcctcccaaagtgctgggattataggcatgagccatcgcgcccggccaacttatctttttattattaacttataacaacctacctatggtaatgaccatatttattctgtatgatgtcatgtcaaacatttgaaatgtgttacggcgtgtatatctcattttattgctccttgctttattgcactttgcagatttttctttctacaaattgaagttctgctgtgttgagtctgtctatcagcaccattttaacaacagcgtgtgctcccttaatgtctctgtgtcacattttggtaattctcccaatatttcaaactttttctttatcattctgttatggtgatctgtgatcaatgatttttttttgagatgcagtctcactctgtcgcctaggctggagtacggcggtgcgatcttggctcactgctgctccgcctcccgggtccaagtgattctcccgcctcagcctcttgagtagctgggtttacaggcgtgcaccaccatgctcagctaatttttgtatttttagtagagacggggtttcaccatgttggtcaggctggtctcgacctcctgacctcgtgatctgcctgccttggcctccggaagtgctgggattacaggcgtgagccactgtgcccgggtgatcggtgatctttgatgttgctattgtaattgttttgggatgccatgaaccacatccatatcagatggtgaacttcatccataaatgttgtgcgtgttgtggcttttataccaactggcctttcccttgtccttctccctctccctgggcctcctcatttcctgagacacaacagtattaaaattaggccaattgataactctacagtggactctaagcatttaagtgaaaggaagagtcacatgtctttcactttaaatcaaaagctaaaaatgattaagttcagtgaggaaggcacgttagaagcttagacaggccaaaggcaaggcctcttgcctttagccaaggtggaaatgcaaaggaaaagttcttgaaggacatgaaaagtgttattccagtgaatggctaatcataagaaagccaaacagccttattgctgatatgaagaaagttttcgtggtctggatagaagatcaaaccagccacagttttcccctaagccaaagcctaatccagagcaaggccttaactctcttcaattctacgaaggctaagagaggtaaggaagccacagaagaaaagttggaagctagcaaaggttggttcacgaggtttaaggaaagaagctatctccgtgatatagaagtgcaaggtgaggccaggcgcggtggctcatgcctgtaatcctaggactttgggaggccaaggtgggtcgatcacgaggtcaggagtttgagaccagcctggccaacatggtgaaacactgtctctactaagaatacaaaaattagctgggcgtggtggcatgcacctgtaatcccagctacttgggaggctgaggcaggagaattacttgaacccaggaggcagagattgcagtgaactgagatcacaccactgcactccagcctgggtgacggagtgagactctgtctcggaaaaaaaaaagaaaaaaagaaaaagaagtgcaaggtgaagcaccaagtgctgatggagaagctgcagcaagttatccagaaggcctggctaagataattgatgaaggcagctatactaaacaacagattttcaatgtaaatgaaacagcctacagccttctatgaaaagaacatgccatctagggcttttatagctagagaggaaaattcaatatttggcttcaaagttccaaaggacaggttgactctcattttaggggttcatgcagctgatgactttaatcgaagccagtgctcctttgccattctgaaaattctaaggcccttaagaattttgcagaatctactaggcctgtgctcaaggaatagaacaacaaaacctgaatacaacacatctgtttacttcatggcttactgaatattttaagcccattgttgacatctgctcagaaaaaaatattgtttctttccaaatattactgctcattaacaatatatctggtcagccaagagccctgatggagagatacaagattagtgtcggctgggtgtggtggctcacacctgcaatcccagcactttgggaggcggaggtgggcggatcacgaggtcaggagttcaagaccagcctggccaacatggtgaaaccatctctactaaagatacaacaaattagctgggcatggtggcacgcacctgtaatcccagctactcaggaggatgaggcaggagaatcgcttgagcctgggaggtggaggttgcagtgagctgagatcctgccgctgcactccagcctgggtgacagggtgagactccatctcaaaaaaaaaaaaaaagaaaagaaaagaaaattagtgtaattttcatgcctgctaacacatccattttatagcccatggatcaagaagtaattttaattttcaggtcttattatttcagcaatacacttcataagggcatggctgccatagatagtgattcctctgatggatctcgtcaaagcccattggaaaccttctggaaaggattcaccattctagatgccattaagaacatttgtgattcatgggagggggtccaaaatcaacgttaacaggagtttggaagaagttgattccagctgtcatgatgactttgagagaagttcaagacctcagtggaagaagtcacagcagatgtggtggaaatagcaagggaactggaatttgaagtagaacctgaagattctactactgaattgactgaattgtggcaatctcataataaaatttgtacacatgaggagttgctccttatggatgaggaaagaaagtggtttctttttttttttttctctaagatggagtcttgctctgtcacccaggctggagtgcagtggtgtgatcttggctcactacaacttctgcctcccaggttcaatcgattctcttgcctcagcctcctgactagctgggattacaggagcacaccaccctgctaatttttgtatttttagtagagaaggggtttcaccaggttggtcaggcaggtgtcgaactcctgacctcgtgatctgcctgcctcggcctcccaaagtgctggggttacagacatgagccactgtgccggccaagaaagtggtttcttgagatggagtctactcccggtaaagatgctgtgaacattgttgaaatgacaaacaaaagatttagaatattacataaacttagttgataaagcaatggcatggtttgagaggactgactccaattttaaaacaaattctactgtgggtaaaatgctatcaaacagcatgcatacgtatctatgtttgtatagaacaattggaacatgtcgacatcattcttgaaatatattttcactggctgggcatggtgactcatgcctgtaattctaggattttgggaggccgaggctggtgcatcgcttgagctcaggagttgaagaccagcctggccaacatggtgaaaacctgtctctactaaaaatacaaaaattagctgggtgtggtggcgcgtgcctgtagtcccagctactcaggaggctgaggcaggagaactgcttgaacccgggaggcagaggttgcagtgagctgggatcatgccattgcacttcagcctgggtgacagagtaagactccatctctctctctctctctctctatattatatattataatattatatatattatatattatattatatattttatatataatataatatatataatatataaaatatataatatatattttatatattatatgtattttactggatattaaatatatatattatatatatattttactggatattaaattgacagttattttctatcagcacgttgatcttattctagattccattgttactgatgtaacaatgtcagttgttatgcaaattatttatttttttaaaagccagtccaatttagcagtaagaggttgtataacaactcgcagtgaatttcttttttaagacaaggtctcactctattgccaaggctaggatgcagtggtgcagtcatggctcactgcagccgcaacctcttgggctcaaatgattctcctgcctcagcctcctaagtgagtagctgggactacaggctgtgccaccatgcctggctaagtttttaaaaaaatttttgtagagacagtcttgctatgttgcctaggctggtctcaaactcctggccttaagcaatcctcctgccacagaggcttcccagagtgctgggataactgatgtgagacaccacacctggccctccaactattgatcttttaaaggacatctgtcttttttctctagctgctgatgagatctctttgcctttagtgttctgcaaacatactgccgcgggtgcgactgctggggccggtgtcgcggtcattaaaggaatttaccgagacagtcatagctaaagaaaagcagatttattggagaaagtatgaagatacattgcaaggttgcaatgggctgcacagcaaagaagcggctgtttgcaaagaggcaggggctagagggatgagtttatgctgctgaggttacatgcggagtgaggtatttgggagcaggatgttgtgccagcctgttgtctgtgattagtcatctctcagaacaattgttttccccaacctgggaccccttcctttttgcttacttattttgtcaggactccacgcatattaatacaatgatgtttctaagtgtagatttctttatacttatgattcattaggcttcttgaatctttgaattagattctctcctcaattttggaaaatttgaaaaatccgccattattttcttaaatattctttctgccatattctctttatcccctcttttgggactcagaatatagataagactctctgtcttatctacactccatgccacttaacctcttttacatgtttcctgctttgtctcttatggtgaattgtggataacttctgttgatctatgttccaattcactatgtctctactcagctgttgcttttacttttaatcctcttttagagtttttgtcattttcaaagtacctagataattttttatagtttctcggtcccttgccattgcaaaacaatggcaatcttatattttatatgaacaaaccacactgttttatgtccctctgatagttctaaaatcacaaggattagtgggtctgtttacagtgtctcttatttctgctagttcttgctcctggtactttgtgttcttggttatacctgcgtgctgctcacgttccttgggaaaaaaaaaatatgtttacaggagtaatttgaggcctttaatgaagattattttcaccagagagaattatctgtgtgttgtcatcaagagtttaaaaatacttccacttggggactttaagtccacaacttgaggtcttttggaccacccatggaataggctgccaagtaacaaaccagggccaatttacttctagttcccccttaccctgagggcatagccattgctttctcagctcaatgtggactccccaccttgcttgggccctagcttttttttgttttccttccatctaagaagccatccaaataaaagtttaaatttgccagggttataaaattcccttagggtagaagtactctgattacttctctgagttcccaattttccatcagttacagcctgataaatcctgtgagccttcggtggtttttttttaagttacagaaattcttttagagatagggtcttgctatattacccatgctggaatgcagtggctattcacgagcatattcattgtgcactacagcctcaaactcctggcctcaaggggtcctcctgcctcagcctcctaggtagctgggactacaagtacaggccactgtgccaggccaatgccttcaagatttaaaaaaacgcatccagcatttttagttgcttttagtgggaatgttggtctgaataacctagcctgccattatcagcaacctcaattactctgtcctctcatctttgcttaatttctcttcttagcatttaacactacttgacattatatatttatttgtccaccaactaggctgaaagctgcgtgggtgcatgtactttgtttgctgctgtcgtctccctggcacccacaataatgcctggaaaatagtgaatactcaatagttgttgaatgaatgaatgaaaaaagaatgattttgcttagtgctttgtgccatggctactgtgggccaaagaaagaggactgggggattcagtgtcaagatctttcaaatcacaattccaaatcaaggtcacaacttaaccaaactggcagaaggaacctcaagtgttcttggctttcagtacttcccaggtttaggtactgagctgagtggcaggtctcagctaccgacgggtttgtgggttcccgtcactctctctgggtctttgctcagttcgcctatctttgcttttgtctgttgtcgtcaccctttaccaagtctcagacagctctgaccctctcatttcctttctttgccctttctctctattcatctctgtgactcagtctctgtgtccttatctttctctagtgggtcttgatcatgtacttcccgtcactctcctcccccataagatacaattctaatggtttctgactttgcccgcacccctaatctctagctgcaggatgtctgacaagccatcttccatctacccccgcgtcttgcctcatgacttttctctatcaccccctttttatgttaccatcccttctgtctgacgtcacgctctctgcctttatatcttcaccactctctctcattgaatgaactctgttatgttcatcctggtagtgtcaccacaactgccctccactcagagtctgtgcattctgttgccattccccctggctctgtctcctctcactctgaatcctccatctctgtcccttgcttggcttctgtctcctctatttctgttggagcctctttctctgagttctaccttctatctccgtctctgtcccgtcagcttctgttccacttctctctttgctattctcttttcttttctttctttttgacagagtctcactctgttgcccagacgaggctggagtgcagtggtgcgaacaccacgcactgcagcctccaactctcaggctctagtgatcctcccacctcagcctcccaggtagctaggaccacagatgtgtgtcactatcaccatgcctggctaattttaaacatttttgtagggacacggtctccttttgttgcccaggttggaggacagtggcatcaacatagctcactgcagccttgacctccctggcccaagtgatcctcctgcctcagcctcccaaatggctgagaccacaggcgcacaacaccatgcccagtgaacttttatatgtttttttgtagagacaggcttttgccacgttggccgggctggtcttgaactcctgacctcaagtgatctgcccacctctgcctcccaaagtgctgggattacattcatgagccaccgtgcccggcctgtctttgctatttgccaccagctctctgtgccctctgtgcactcttaatctactattgcttcctgaatctctgatattgacaccattatctctgccccatccatctgagtttgttctctttgcctcactcgctgttgcctcagattttgtctctggcaccatctccatatttgtcacttgtccccgtatcacttctgttatctctgccatgtgtctaacactgtccactatatctttatagcctttgggtctctgtcttctctgtctctatggctgtcaccttctctgtgtcggccacatccccttatctctttctcccctatcactgtcccttagtctctgtcccttctgtcacagtcctccctgtttctattactgtccccttggtatctctcccatcttcctccttcctcttcttcccctctccttctccttctccttccccttctccctctcctctccctctccttcttctctctttctctcactttttctttttttttttttcttttgttgttgttgctttgtgtttttttgacgtagtctcaccctgtcgcccaggctggagtgcagtgacacaatcttggtaaactgcaacctttgcctcccgagttcaagcgattctcctgcctcagcctctccagtagctggaactctccagtagcaggcactacaggcgccgccaccagacccgcctaatttttgtatttttagtagagacggggtttcaccgtgttggccaggatggtcctgaacttccggcatcaagtgatcctcccgccttggcctcccaaagtgctgggattacaggggtgtgccctcgcgctcggccgtctctcgcgtctttcttagactccctgatctctgtcctggcccccgggatctttgtcttcgtcccctctctagttcgctcccagcagattcactgtcttctctctctggtcctctcccctttgcctcggactgtatcctcttcgtcgctgttgatcccactgctgcactgtcctcgctgctgtcttctcacagtcctgtcgccatccccatcccctgcctcagtcccctgtgccgtcggccgctccacctgtgaccgtggagtctttttctgtcacttccgtctctgtcacatcccctctggtcgctcctggtcggaggccctgcctccctcgcctcagggcccttccccgctccttctcttcctgtcatccctggctccttcccagcgtctttccttccttctccgaatcgtcctctgctcctctgggtttgcgcctgctgggagctctgcccctgggagctgtttcctccgctcagtctctgggtgtttcctagggggtcacatgctcttctaggcctgtcctggggcagaggggtcgccctgaggtccatcagtcagtctgaccatctccttcgaacctcgagcctctcgcctcgcctcgcctgacgccctttcccgccctttatctttcccttcaggataaaaaataaaaagagtcggaagcatcagcgcctagggcccaatcgccactctggaacaggtgtgcgcggcgggtccgcgggctggcgggagctcacacgaactcacgcgcgagctcgcaggccgcggcggccggctggcgactagtgacgtcgcaggggcttgtccctgccttactggctgccttcgaccagcgcgcgcttgctggagtagacggccgcgcctttcccagcgccagggggcgctcagcgctagagctcactgaccctgggagccctatggagagactcgtgtcatcctggcaaccctgtcctacctgattggatacctgctgccgttcgttggatccattactctgatcggatgcctggtgggtcaaggcttgtacataactggatgcctggaaatgtggatctaccctacctttggcatgtctctctcttagcgggatatcttccgcaagcactggggatgtggacaaggaaagtaaattgagtctccgttggggagtgaggggtgttggacgtggcacgggaacccggccggagtcagcggacccaattggctgctctctctcagatacagttccccttcctccctccagggggcgccatggaacgcagggccctcactggctctggggactgggtgacgtcaggggtgagcctctcgtgattggctccatcaccctgcgtaagatcaaagggaagaaaggagagccccgacagccggagccattgtggctccggccgattgcgccggccctcgggccctcagggaggcgagggtgtgagggtacagagttcgaggccaacttggtccacattggtaggaaaaaaaaaattttttttatcgttccctatataacaacaaaacataaagggaggacgccttgataggaagaaatgacatcttcctaagtgtttttaaattacttcaatgtatctttttttttttttttttttttttgggagactgagcctcgctctgtagcccaggctggagtgcagtggtgtgatcttggctcactgcaacctccgcctcctgggttcaagcgagtctcctgtctcagcctcccgagtagctgggattacaggcccacgccaccgtgcctggccaattttggtatttttagtagagacggagtttcaccatgttggcgaggctggtctcgaactgctggcctcaagagatctcgccccttggcctcccaaagtgctgggattacaggggtgtgccctcgcgctcggccgtctctcgcgtctttcttagactccctgatctctgtcctggcccccgggatctttgtcttcgtcccctctctagttcgctcccagcagattcactgtcttctctctctggtcctctcccctttgcctcggactgtatcctcttcgtcgctgttgatcccactgctgcactgtcctcgctgctgtcttctcacagtcctgtcgccatccccatcccctgcctcagtcccctgtgccgtcggccgctccacctgtgaccgtggagtctttttctgtcacttccgtctctgtcacatcccctctggtcgctcctggtcggaggccctgcctccctcgcctcagggcccttcccggtctccttctcttcctgtcatccctggctccttcacagcgtctttccttccttctccgaatcgtcctctgctcctctgggtttgtgcctgctgggagctctgcccctgggagctgtttcctccgctcagtctctgggtgtttcctagggggtctcatgctcttctaggcctgtcctggggcagaggggtcgccctgaggtccatcagtcagtctgaccatctccttcgaacctcgagcctctcgcctcgccccgcctgacgccctttcccgccctttatctttcccttcaggataaaaaataaaaagagtcggaagcagcagcgcctagggccgaatcgccactttgcaacaggtgcgcgcggcgggcccgcgggctggcgggagctcacacgaactcacgcgcgagctcgcaggccgcggcggccggctggcgactagtgacgtcgcaggggcttgtccctgccttactggctgccttcgaccagcgcgcgcttgctggagtagacggccgcgcctttcccagcgccagggggcgctcagcgctagagctcactgaccctgggagccctatggagagactcgtgtcatcctggcaaccctgtcctacctgattggatgcctgctgcagttcgttggatccattactctgattggatgcttggtgagtcaaggcttgtatataattggatgcctggaactatggatcttccctacctttcgcatatctctctcttagcgggatttcttccgcaagcactggggatgtggacgtggaaagtgactggcgtctccgtgggggagtgaggggtgttgcacacggtgcaggtacccggcgcgagttagaggtccctattggctgctctctctcagatacaggtcactttcctcctgccaagatgcgccatggaacgcagggccctcgctggccctggggactgggtgatgtcacgggtgagcctgtcgtgattggctatatcgctgtgcctaagaccaaaggaaagaaaggagagcccggacagctggatccgccgtggttcagggtacacgttataggccaacctggtcaacaatgatttaaaaaaaaaattttattgttccctatatcataacaacaaaatataaagggaggaagacttcagaggaagaaattgcgtcttcctagccgtttttaaattacttcaaaaaaaaattttttttggacgaagtcttgctctgtcacccaggctggagtgcagttgtttgatcttggctcactgcaatctccgcctcctgggttcaagcgggtctcctgtctcattctgccaggaggttgggattacaggcacacgccaccgcgcctggctaatttttgtatttttagtggagacggagtttcaccatgttgcggaggctggtctcgaacttctgacctcaagagatcctcgcctcttggcctcccaaaaagctgggattataggggtgaggcaccttgcctggccgtctctcccgtatttcttagaccccttcatctctgtcctggcccctgggatctttgtcttcgtcacctctctagttcgctcccatctgattcactgtcttctctctctggtcctgtcccctttgcctacgaatgtatcctctttattgctgttgatcccactgctgcactgtcctcgctgctgccttctcacagtcctgtcgccgtccccatcctctttctcagtcccctgtgccgtcgggcgctccacctgtgaccgtggggtctttttctgtcccctcggtgcctgtcacaacccctcttgtcgctcctcccctgcctccctcgcctcagggcccttccccgtctccttctcttcctgtcatccctggctccttcccagcgtcttttcttccttctccgaatcgtcgtctgctcctctgggtttgcggctgttggggactctgcccctgggagagagaaatgcgaaacgtatttctgggagctggaagctgtttcctccatttagtctctggatgttttctaggtgaccacagcctcttataggcctgtcctggggcagagcggccaccttgaggtccatcagtcagtctgatcatctctgtagaacctcgaacctctcgcctcgcctcgcctgacgccgtttcctgccctttatctctcccttcagaattaaaaaaaaaaaaaaaaaaaaagacagtcggaagcagcagcgcatgagccccaatcaccactctgaaacaggtgcgcgcggtggcctgcgggctcgcgggagctcacgcgaactcacgcgcgagctcacaagctgcggcggccggctaggcgactagtgacgtcaccgaggcttgtccctgccttattggctgccttcgaccagcgcgcgtttgctggagtagtcggccacgccttgccaatcgccagggggcgctcagcgctagagctccgcgaccctgggagccctatagagagactcgtgtcatcatggcaaccctgccctacctaattggatacctgctccagttggttggatccattactctgattggatgcctggcgagtcaaggcttgtatataattggatgccggaaatttggatcttttctacgtttcgcatttctgtctcttagccggatttcttccgcaagcactggggatgtggagattgaaagtaacttgagtctccgtgggggagtgatgggtgttgggcacggtatgggaacctggcccgagtctgcggacccgattggctgctgtctctcagatacaggtccctttcgtcccgccaaggggggccatggaacgtagggccctctctgtccctggggactgggtgatgtcaggggtgattggctacatcgctccccagaaggtgaaatggaaaaattgagagcactttcccaccagcttcggtggctccatcaggttgtcctggcgcacaagctggcgatgctatgtgtttgaagctaacctgggcaaaattgaaaaaaaattgttttttcattgttccgtcataaagggaggtctcgacaggaagaaattgcgcttccaatagaattgtttttaaattactgcaatatatcttttgagatggagtcttgctctattgcctagggtggagtgcagtcttatgatctcgtctcactgtaacctctgcctcttgggttgaagagagtctcctctctcaccctgaggttacaggcgcacactaccacacttggctaatttttgaattttggcttctttttgagatggagtcttgctccgccgctgaggctcaagggcagtggtgcgatcttggctgactgcaacctctgccttccgggttcaagtgattcatctgcctcagcctcccgagtagctgggactacaggcacgtgccaccacgcctagctaattctttgtatttttagtagagaaagggtttcactgtgttaggatggtctctatctcctgaccttgtgatctgcccgcctcagcctcccaaagtggtgggattacaggtgtgagccaccgctacctggccttttaaaaaatttatttatttatttatttatttttattttgaggcggagtcttactctgttgcccaggctggagtgcagtggcgtgattttggctcactgcaacccccgcctcccgggttcaagcaattcctttgcctcagcgacccagtagctgggattacaggcgcgtgccaccatgtctggcaattttgtgtatttttaatagagacgaggtttccccattttggccaggctggtcttcaactcccgacctcaggtgatccgcccgcctccgctttccagactgctgggcttacaggcgtgaaccactgcgccagcctctttatcccttctatactgcataccccaagttgcaaactgttattagagtgaatacctaggggcaacttggatccttataatggacacctgatatttttgcctgagtgacatctgttatctctgattttcttcttcattaataattttttttggagcagtcttaggtttacaggaaaaaatcgaatgaaaagtaccgagagtttctacatcccccttcatcccttcattgcccctcatcttccctgttaacatcttgtgttactgtgctacgtttgttacaattaataagccagtattgatacattattattagctgaaatctgcagtttacattaaggtccactccttgtgtgataccttgtacagtctattttttttttaataaagtatttttttggtttttttttttttttttgagatggagtcttgctctgtcacccaggctggagtgcagtggcgcgatctcggctcactgcaagctccacctcctgggttcacaccattctcccgcctcagcctcctgagtagctgggactacaggcgcctgcaatcacgcctggctaattgtttgtatttttagtagagacggggtttcaccgtgttatccaagatggtctcgatctcctgacctcatgatctgcccaccttggcctcccaaagtgctgggattacaggcgtgacccaccgcgccaggccttttttttttttcagttttaaaatcacagcaaaattgagaggaaagtccatagtttacattcagtttctctcttagtgttttattgtctatgggtttgaacaaatttataatgacatgtgtccaccattatagtattatgcagagtagtttcactgtcctaaaactcctctgggctctgctgattcatccttccctcctcccaaacccctaaaaaccaatgatttttttttaactgtctctatagtgtttccttttccagaatgtggtatagttggaatcataccatatgtagccgtttcgtattggcttctttcacttaacaatatgcattttaggttcctccatatcttttcatggcttattataactgattaatattccattgtatggatgtactgcagtttgttcatctactgaaggacatcttgtttgcttccaagttttgacaattatgtacagagccgctatgaatatttgtcttcaggtttttgtgtggatgtaagttttgagctcatttgagtaaataccaaggaacatgagtgctgcaatatatggtaagagtgtttagttttgtaaggaagtgccaaattgtcttctaaagtggctgcaccattttgcattactgccagagatgaataagagttcctgacgttcctcatcctcatcagcacttggtgttattcatgttttggattttcaccattctaataggtggttgtcgtatgtcatcgttgctgtaatttgcaatttcctaatgacatttgatgttgagccccgcttttttttggagacggagtcttgctctgtcgccgaggctgaagtgcaatggcatgatctcggctcactgcaacttctgcctcccaggttcaagtgattctcctgtctcagcctcccaagtagctgggattacaggcatgcgccactacgcctggctaattttgtatttttagtagacatggggtttctccatgtcgatcaggctggtctcgaatgcctcgcctcaggtgatctgcccaccttggcctcccaaagtgctgggattacaggtgtgagccaccacgcccggcccaagtaccttttatttatttgtttgtttgtttatttatttattttaagaaacagggtctctgttgcccaggctggagtacagcagtgcaatcatagctcactgccgcctccaactcttagatcctccttctcagcctccccagtagctgggactacagttgtgtgctgtcacacctggctatttttttatttctatttttattattttatttatttatttatttagaaacagggtctcgctctgtcatccaggctggaatgcagtggcactggaatctctgctgactgcaacctctgcctcctagactcaagtgatcctccgacctcacctttccaagtagctgagaccacaggtgtgcaacaccacacctggctagttttttgtatttttcgtagagatggggtttcaccacgttgcctggctggtcttgacctcctgagctcaagggaattaccagctgtggcctcccaaagtgctgggattgcaggtgtgagccaccacatctgacctttttatttttattttttgtagagatggcgtctcagtgtgttgcctaggttggtctgaaactcttggcctcaaatgatcctcctgccccagcctcccaaagtgttgggattataagcgggagccaccacacctggccaactatctttttatttacttatttgccatctgcatatcttctttgttgaagtgtctgttcagatctgttccctatttttaaattgggttgtttgttttcctattgttgagttttagttctttgtataccagctttcttttttctttttctttctttctttttttttttttcagacaaagtcttgctctgttgcccaggctggagtgcaatggcgcaatctcagctcactgccacctccgcctcccaggttcaagtgattctcttgcttcagactcccgagtagctgggattacaggcgcccaccaccatgactggctaatttttgtatttttagtagagacagcattttgccacgttggccaggctggtctcaaactcctgacctcaggtgatccgcccacctcggcctctcaaaatgctgggattacagatgtgagccaccacacctggcctggataccagctttttgtctgaaaggtgttttgaaaagattttctcacaatctatagcttctctttttgttctcttaaacatctgattttcctatcactcctccccatgcaaaatatacattttttaactggatcttgccagggatttcagagtgagaacaagagtcagacctggccaatctgagtgcttcatgaccttggttatgatgtgcagtagtttggatgtatgtcccatccaattttttttttttttttttttgagacagagttttgctttgtcacccaggctggagtgcagttgcacaatcttggctcagtgcaacctccacctcctgggttcaagtgacccttctgcctccgcctcctgagtagctgggattacaggcacatgccacgcccggctaatttttgtatttttaggagagacggggttttcccgtgttggccaggctgccttctaaatttcgttgttgaaatttgatccccaatgttggagatggggtcctaatgagaggtgtttgggtcacaggggtggacccctcacaaatagattaatgccctccctgggagtgtgggtgagtgagttcttcctccattagttcccattagagttggttgttaaagagaggctgacacttgcctctcttgcttcctctattgtcacgtgatccctgctttctttctccttccaccaagagtagaagcagctcaagactttctctgtatgcccaatcttccagccagaagaatcataagccaaatacacctttttctctttataaattacccagcctcgtggatcactttaggtcaggcgttcgagaccagcctggctaacacggtgaaaccctgtctctactaaaaatacaaaaaattagccaggtgtggtggcgggcacctgtcataccagctacactggaggcaggagaatcacttgtacctgggaggcggacattgtagtgagccaagattgcaccactgcactctagcctgggtgacagagcaagatcctgtctcaaaaaaaaaaaataaataaataaaaataaaaattacccagcgtcaggttttcctttatagcaagacaacatggactaagacacatggttactatagaaatggacatgtgacccaagttggaccaatgagagctaaccttgagactttggtatcaccattcaggaaagcagtacctcttttctgctaggttgttaaaatgatagtatggaaactttgagctgctgtgggccctgtttgtcaccgtgagggaagagattctgcctgagaggaaagtcaagatacagaaaagtaaagcccagatgggaaatgagctgtattgctaaagattcattttagtgcctggatccagttatgcctgaagctagttatacagctcggttctataagtcaacaaattccctttgttaaaaacaaaaaaaagccagagtactttccagagagcaaggcttattataataataattaaagcagcatactcttgcgaggaaaaacaaataggccaaaagaacaagacggaaaaatcaggaaaagttcacacatatatggtaacttggtttatgacaaaagcaacatttcagtgcagtgagaagcaaaagatgatctttttgaatcaatagggctgagccagttgatagccatatgacctctacctcacaccatacacaaaaattgattccagatgtgttgtagatctaaatgttaaagcttaaacaataaaacttctagaagaaaatatcatagagtatcttcagaaccttcagggtaagaaaatatttcttttatttacttgtttgtgttaatagagatagggtctcgctatgttgcccaggctggtctcgaactcctaggctcatgtgatcctccctcctcagcctcccaaagtgctgagattacaggcatgagccagtgtgcctggccagaaaatatttcttaaaccagaaacaaaggagccttaactataaaggaaaatgttgataaattggactatattaaaatagaaactgatccttatcaaaaaataccactaagagaatgaaaagagaagccagagagtgggagaagaatatgtattctaacaaaagactcataagaaaaataaagaaagaactactaacctgttttttaaaaaaggcagaaaaaccagtcaaaaagtggacaaatggcgtgaattgacatttcacaaagtagcatattcatatggccaattaatatttgaaatggtgttaaatttctttctatttttttttttttttgagactgagtctcgctctgtctcccaggctggagtgcagtggcgtgatcttggctcactgcaagctccgccttccgggttcacgccattctcctgcctcagcctcctgagtagctgggactacaggcacccgccaccgcgcccagctaattttttgtatttttagtagagacggggtttcaccgtggtctcgatctcctgacctcgtgatccacccgcctcggcctcccaaagtgctgggattacaggcatgagccactgcgcctggcccgaaacggtgttaaatttctttaggcattgggctaaaggtaaattaaaaccataataaaacacggctacagccccaccagaattgctaaaattgaaaggactaacaataccaaatgttggcgagcaactgaaattctcagagactgctagtgggtgtataaatggagaaaattagtttgaaaacctggttggcagtgtctatgaaggatgaacatgaagctgggaatggtgactcacgcctgtaattccaacacttcgggaggcggcagatcacctgaggtcaagaccagcctggccactcccatctcaaaaaaaaaaaaaagatgaacatgcacacaccatgtatacaccctgggacccagcaattacacttctaggtatatacccaacagaaatacagaaatgcctacatatgttcaccaaaattcaatgtatatagcagtactataagtgatcatgccaaatcagaaggcacctaaatgtcaatcaacagtagaatggatacatagattattatgtattcccataacacacttttttttttttgagacaagattgtcctctgtcacccaggctgtagtgcagtggtgtgatctcagctcactgcaatttctgcctcccaagctcaagccatcctcccacctcagcttcccaagtagctgagatgacaggcacgcaccaccacaccccactaatttttgtattttttttgtagagacggggtcttgctatgttgctcaggctggtcttgaactcctgtgctcaagctatctgcttgcctcaccctcctaaagtgctaggattataggcatgagccaccatgcctggctcataacacactcttatacagcaatgacaatgaacaacctccaacaatcagcaactacatggacaaatctcatagacgtatgatgaataaaacaattcaggccaggtgcaatggctcacgcctgtaattccaacactctgggaggccgagatgggcagatcacaaggtcaagaaatagaaaccatcctggccaacatggtgaaaccctgtctctactaaaaatacaaaaaattagccgggtgtggtagtgcgcacctgtaatcccagctactcaggaggctgaggcaggagaatcgtttgaacctgggaggcgaaggttgcagtgagctgagatcatgccactgcactccagcctggtgacagagcgactctccgtctcaaaaaaaaaaaaaaaaaaaaaagagagaattccaacacacaagtctctatgcttgtaggattccaagcagattaagataaaaaacaaggcaaactaacttatggtgtcagaaatcagggtagtagttacttttgaggtaaagaagtgactgacaaggggccgggcgcggtggcttacgcttgtaatcccagcactttgggaggccgaggtgggcagatcatgaggtcaggagatcgagaccatcctggctaacacggtgaaaccccgtctctactaaaaatacaaaaaaattagccatgcatagtggcaggcgcctgtagtcccggctactcgggaggccgaggcaggagaatggcgtgaacccaggaggcggagcttgcagtgagccgagatagcgccactgcactccaggcgagactctgtctcaaaaaaaaaaaaaacacaaaaaagtgactgacaaggagcatgaggggtttggagagctggtaatgttctagttcctgacccagggctggttacccatggttacatggtgtgctcagtctgttatctgatccatacttactgggtatttgtgagtttctttgtgagtatgttgtacttcaataattgtttttttgaaactgggtctctgtcatccagactggactgcagtggctcaaccatggctcactgcagccttgacctcctgggctcaagcgatcctcccacctgagtagctgggactacaggtgcacaccatggcacttggctatttatatatatatatatatttaaagagatggagtcttgctatgttgccaaggctgggtctcgaactcctgggctctagtgatcctcccatcttagcctctcaaagtgctgggattacaggcatgagccaccgagcttggcaataattttttaaaaggccagttttttgtctcttgaaagtggaggagtcttggcaagtccagcaaatggcatatactattttgtttctcttccctcccctttcaagtgagaattgtgattgttttcttgtttttcctccactgttatacacaggggtgggttgctgagggggctacaatttcatttaacattaattttttttttagatggagtcttgctctgtcaccaggctggagtgcagtggcacaatctccgctgactgcaacctccgcctcccaggttcaagtgattcttctgcctcggcctcccgagtagctgggattataggtgtgtgccaccatgccgggctaatttttgtacttttagtagagacagggtttcaccatgctggccaggctggtcttgaactcctgacctcaggtgatccacttgccttggcctcccaaagtgctgggattacaggtgtgagctaccgtgcccagccttaacattaattttcaggatcaagagagactccatgtgcccttgatgaaaggaatagccaatatccagaaatcttggtctgaggattggatgtggctttgggatccctccctttgcagaaggggtgaaagcttctgcagttgcactagagatagttatgttaggtgggagtattagttttagccaactttatcaaaatataatttgtgtacaagaaaatgtatcaatatttcaaaaagatatttgcaacacactttcatagcagcattatttacaatacccaaaaggtgaaggaggcaacccagctgttcatcaacaaataaatggttcgacaaaatgtggtatatacacataatggatttttttttttgagatggagtctcgctctgtcgcccaggctagagtgcaggggtgcgatcttggctcactgcaacctccgcctcccaggtttaagtgattcccctgcctcagcctcccgagtagctgggactataggcgcctgccaccacgcccggctaattttttgtagtttagtagagatggggtttcaccatgttgaccaggatggtctcgatctcctgacctcgtgatccgcctgcctcttcctcccaaagtgctgggattacaggtgtgagtcactgtgcctggcccataatggaaaattatttaaccttaaaaaggaaggaaatgctaacacatgctacaacatgggtgaagcctgaggacattcatgctaagtgaaacaatcccatcacaaaaagacagatgctgtatgattccacttacatgaggtacctagagtagtcaaattcatagggaatttcccagagagtagaacgtgcttcccaggggctgggaagggaaggcagtgggagttgcttgatgggaacagtttcaattctacaagaggaaagagtggagatgagtaggggtgatgattgcacaacaatgcaactgtacacttaaaattggctaagtcctggggaggtggctcatgcctgtaatctcagctactctggaagctgaggcaggagaatcgcttgaaccggggaagtggaggttgcagtgagccaagatcatgccattgcactccagcctgggcattgcagcgagactccgtctcaaaaaaaaaaaattggctaagatgataaagtttgtgttatgtgtattttgcaacaatgtacaagaatttaaatgaaccaattttaagcgcaatgaattttgacaaatgtattcggttgtgtgatcacttccatcatccggaaagtttccctgtgtccactagtaatcagtctctccataaccactgccactgcccccagtcaaccactaatccattttctgcccctgcgtattagccttttcttttctcttttcttctcttctcttcttttcttttcttttactctgtcacccaggctggagttcagtggtgtgatctcagctcactacaacctccgcctcccaggttcaagccattctcctgcctcagcctccaaagtagctgggattacaggcactcgctaccacacccggttaatttttgtatttttagtagagatggggttttaccatgttggccaggctggtcttgaactcctgacctcgtgatccacctgccttggcctcccaaagtgctgggattacagggtgagccactgtgcctggcctctggcgtctttctttctttctctttcttttcttttcttttcttttttctttctttctctctctctccttccttccttccttccttccttccttccttccttccttccttccttccttccttccttctctctctctctttctttctctcttttttgagttggagtctcactctgttgcccaggctggagtgcagtggcatgatcggctcactgcaacctccgcctcccgattctcctacctcagcctcccaagtagctgggattacaggtgccaggctgcttttgaacttctgatctcaagtaatccgcctgcctcagcctcccaaagtgctaggattacaggcgtgagccaccatgccctgcccatattagtgttttctttctacagtttcacaaaagtggaatcctacagcatatacccttgtatctggctgtatcacacggcatcatgtttttgagatgcagggcagcagtgccatcacagctcactgcagcctcaaactcctgggctcaagtgatcctcctgcctcagccaccagagtagctgggactacaggtgagcaccatcatgcctggataattttattattattattattattattattattattattatacctggataattttattattattattattattattattattattattattattattactactactactactactattatttgtagagacagggtcttgctatgctgcccaggctggtctcgaactcctgagctcgagcaatactcccacctcgacctccaaagtagctggaactacaagtgaacatcaccatgcccggccaatttttttttttttttttaagagaatctcaccatattacctggtctcaaactcctgggcttgagcgatcctcctgcctcagcctcccaaagtgctgggatttacaggcatgagccactgtgcctggtggttactaccacattgacttcagacttctggcctccagagctgtgagagaataaatttctgttgttttcagctaggttattgtaacttgttacatcagtcctagcaaactgacacagtgattggaccaatttttgcagtgggagtttttgaaatgttgtgtcccggaatgtagatgtgaattagtgtgaagtagctgagggtagaatgtagtggacacctactgctttgagggactgtcccttgcccattgccgtgtgattcacttggaactgtcagtcaagggacccctacatatatggcttccaggagatgaattcatccctccagcaaaaagggatgaggtgcagaggggctttggaccaatcctgggcaagatgggcaggggaggaggaggaggagtcagcaaaggcaggaggcgggcccaagagtaggctccaaactggacccaatgattggcccggggtgtctccaaggtctgcgctggaccaatcagaatcctgttcctgaatgacacagcagctgggagccagctgattctcacattgtttcctctgaagttatctgctctgaaggcaattacaagtcctgttaatttcttgcaatggcagcagatcctgttaatttcctacccaacaatagttcccctccccgtgcttcctctaggcaaagcccgcaccccaccatggggactggaaatgacagatgttcactacccagaccgctttgcaactcggggtagccacacagccgggttctggcaagagagaaataaggagaattattctgaggaggaaaaatggggaacacagaaggggaggccccggtctacactgcctgatttagatgccagtgtgtgaaaacatgatgctgctatagacagtttgtactcaggaggggaacgaacaccagtctcagagatgccaaccagagcctaatgttgttgagcagctgaaccaaccctgggactgtctttgaaaaatttgatatgcaaacatgcaaaaaaatctttctctttcagttgggaagttttttttttttttttcagccgaaggtatcataacagatacagcattatacacctggagctccaagtgaccatctcattgccactgcaaacacctacccgagagagaagccaatagccaggcgcggtggctcacgcctgtaatcccagcactttgggaggccaaggcgggcagatcacaggaggtcagcagtttgagaccggcctgccaacatggtgaaaccccgtctctactaaaaatacaaaaaattagccaggcgtggtggcgagcggctgtaatcccagctactcaggaggccgaggcaggagaattgcttgaaaccgcgaggttgcagtgagccgagatcacaccactgcactccagcctgggcaacaagagtgaaactccatccaaaaaaaaaaagaggaaagcagaagtgagagtcccttgaacagcctgaagtccctctgtgttcaatgtgttcataggctttccatggacagaggtctttcaattctgtttatggctttgggttgaattttgtgttctgtactcacaatgatcctgactaacaccatttttataaactgaggctcagagagatcattaagttgcccagtcattgaaagaaacacaaatttgtctgcttgcagagccagcatgttccaatccggtttcccagtctcagagaggacaggaggcccagttggagtgagacccacagagtgtgtttattctggcgttgatagcagcagcagtggggggaccggccagacgcaggggtgtggcgaacagaaggggtggacacaggtgtgtgtgtgtctgaaaggacagagaggattggcccattgacattcacggcgagaacaagggtcgggacactgagtcttggacaaacagcaaagagacagagacagacagagggttttggggggcaggggtcccccagacatgcatggcccctcgcctcgagggggagccccagggaagaaaagacagacacagtggaggctgaatgacccccaccctgaaagaaggagctgggccggcctcctctcatcctctcgcttccagggttaggaagcctagggccagggctgccccgcaccagcagctcggacgttatggcttcaaggagatgaattcacggtccgggcaggaaaggatggggtcctgagggagcctggtccgatcccgggcctaggccagacctgcacgatggagcaggaaaggaggggtcagcaatggcagagaactgcaccacgacctcctgtagctccatcaccacccagagatccaggagtcccaggcgcagcccctcctccctcagacccaggagtccaggcccccagcccctcctccctcagacgcaggcatctccacccccagccccttccctgtggccaggctgcttacccctcactcggagttctctttctctgatagtcctttgctgccttttgtgaagctggtcacagtcttttcctaaaggagaaagtgcagaaggttcgggagtgagagacagagagttgaaacagatgctaatcatcaacaggagaagacgtcaatcctgtttcattatttaggatgcgctttctcacttggccctgaagtgacggacagatggtattacaattccattctacagatggggaaatggaggcacaaaaaagaggagtctctgcaaatgcgaggagagatgaggctgtagggatgagtggggcaagtcctgcatggtatcagaggggctgagactctgtcctggggccactggggagccacgggagggctgtgagcaaggaaggggaggggaagctctgggtgtagaaggatcttctggggccacagggagcatgaggggctgaaattcatgggcagtgtcaggactcggcctagactctgtgccaccagcgttgcccaacatgggcagtggctcaccagaaactcctgggaaggttggtgggatgaattaatgaacggatgaatgagtgaatgacaggaggagggagtagcctccatcctatccaccttagtagagtccccgtcttttccaatctcaaatctgagttctgtgcccaggtgtcgggtccctcatgatcactggaaaaaagcccacagcagggccagactaaatctggtgatgtggtgaaagtttcacccagtactaaatgtaaatgtgtgccccaaatgcagcaatcaagataaagaatatttcatgcaatattggccaggcgcggtggctcacgcctataatcccagcactttgggagcccaaggtgggtggatcacttgaggtgggaagttgagaccagcctggacaacatggcaaaaccctgtctctacaaaaaaaaaaaaaaaaaaaaaaaaaaaaaaaaaaaaaaattagcagggtgaggtggcacacgcctgtagtcccagctacttgggaggctgaagcaggagaatcacttgtactcagggagggggaggttgcagtgagccaagactgcaacactgcactccagcctgggtgacagagtgagactctgtctcaataataacaataataataataatgcaagattttaaaaaaaatcaaaattaatgcaaaaaaatcaatgatgaagaaaatatcaaatttttaaaaaaggccagtctcatgccacatcagactgctatttcaaaggaaatgtatgtgccctcatatacttgctttttttttttttttaaggagaggggttcctgctccattgcccaggctggagtgtggtggtgagatcatagctcactgcagtaacaaactcctgggctcaagagatcctcctgcctcagcctcctgagtagcagggactataagcacacactaccatgcctagctaattcctaaattatttttgtagagacaggctctccccatgttgctcaggctagtcttaaactcccaggctcaagtgatccacccaccttggcctcccaaggcctgtgctgggatttcaggcatgagccactgtgccctgcccaagtttttatatattttttctaaatttatttttcctggaatgctaaactagttgaaaaatactgaaaaatgaagtaagtgtgttgaaattcacaacattattttacatttaaatctttcatatataccctagacagaatttgaataatttgactttcttggcttttaatggaggcaaatctgccaataacactttctaaagctacttctttgctcctcttgttttctattgagagaatggccatgtttgattatttctcctgatcaagcgataatcttaaatgacttttttttttttttttgagacagagtcttgctctgtcgcccaggctggagtgcaatggcgccacctcagctcaccgcaacctctgcctcccaggttcaagcgattctcctgcctcagcctcccaagtagctgggattacaggcgtgcgccaccacgcccagctaattttgtatttttagtagagacagggtttctccatgttggtcaggctggtctcaaactcctgacctcaggtgatccaccctcctcggcctcccaaagtgctgggattacaggcgtgagccaccacgcccagccccctctattttcaacttagcctcatgggtaacaacagcagcgaccacctacagaacgtttaactcagcacatctcacctctatcctaacagaagatgctatcaacagtcccatttcctagtgggtaaattgaggcacagagcgcttgggtaactggctctaagccgcacagctaaagttggcacagcagggattgaaacctaggacgcctggctctgcgactcacgaacatgcagggcgttcgttgcatggatgaaggggccgagggtgcacgggtgcttgtcaggggtcggtgtgggacccctactcacctccactagctgatgccagtgctccacgggcttgcggggattggccagcatctctgcccagtgctcgcggccgtgcgggtcggcagcgtcggggcccacacggcacacgccgatcacctcgttgtgcccgatgctgggggttggggtcagtgaggaccgtggagggtggtgggagggcctgtccccaccccagccctcctgcctgacccccgcccgggccgcgcccctcaccagtcgtagtctaccacggcgatgctgagccccacgttctccacgctctcgggggccacgtcgaacaccagcgcctcattataggtggggttcagcgtgttcttcttgatggaggttttccgcttcttcagacgccgcccctcgctgatcagggaggccttcacgtaggggtctgggaacagcaatgaagtaaggaacagagactcactccctcagacctaggggtccaggaccccaggccccgagcccctcctccctcagacccagaggtccggggccccaggcccccagtccctccttcctcaggcccaagagtccagaccccaggtcctcctctctccgacccaggagtccaggcccctggcccctcctccctcagacccaggagtccagatccccagctcctcctccctcagacccaggagtccaggcccctggcccctcctccctcagacccaggagtccaggcccccagccctcctccctcagacccaggaccctcacctgagaagccagtgaggtccatcgctttgaggttagaggctttgatgatggtcacggtgaggcgcccggccgtggggaggtagcagagtgagaagttgagctccccaagatctgctttttcctgcagttggggaaaaggtcagcgatatcttgcctcagcccctcttcaactctccctgattttctctccggtcggagcctcctgctttacaccctgacatccagggctcaggcttcccatccacttagcaatctgactcttgggacaaggcccagtaattccctggccacagctgcccatgaccatcaaagcttatttgttctgcaggaaagattggaagaagcatgagtgaggggagagagagaggaggggagagacagagaaggtgagagagagagaaaacacaaagagaaatagactgagacagaagccaaaacacggagggatacagctggaaagacagacccacaggcaaagttctcaagtcagagggacagaggcccagagacagacacagagagagacccagagagagggagacagagacccagaaagagagggagacagagacccagagagagagggggacagaggcccagagagagagggggggggacagagacccagagaggaggacagagacccagagagagaggaggacagaagcccagagagagaggaggacagaggcccagaaagagagggggacagagacccagagagaggaggacagacccagagagagaaaggggcagagacccagacagagagggggacagagacccagagacagagagatagagacccagagagagacagaagcccagagacagggggtacagagacccagagagagaaagagagagagatatatatagagagagactcagagagagacagaggcccagagagagagagggacagagacagtgggttgggggtgcataaagacccagagagagtgatagttacctagaattagagtggaggggcagagaccagagagcgagagagaaacctagactcagataccctactccctgcaccaagagaaagagagagagagagagagaggctgactcagacagagtgggacaaagaccaagcagacacacacacataaaccagcctgagagagggcaggagattcatcaacctccaccgaagtttccaggactgcccccaaccctgacacacaggctggagccacgctggagctagctgggagctttgaccaacctggcctagccctgcggcctcccaactgtgcccaggactccctactcattcccctcagggcatctgcccaggctgtccctctgccagaacactcttccctctatctctccttggcctttgagcctcccctcgttccacaagctcccagatcccccacagccctgcagaggctcctcctgtgcctccccataaccctggcccctgacacaaggcccgaccatctagacctggagctgccgagggctgcctggggtccccaggccctgctcctgaaaaaaacagtggttgaagaaatgaatgaaggctgggtgcagtggctgatgcctgtaatcccagcactttgggaggctgaggtgggcggttaacctgagctcaggagttcgagaccagcctggccagcatggcgaaaccctgtctctactaaaaatacaaaaattagccgggcatggtggcaggtgcctgtaatcccagctacttgggtgactgaagcatgagaatcacaatcacttgaacccgggaggtggaggttgcagtgagctgagattgcgccactgtactccagcctgggtgacagagagagactctgtctcaaaaaaaaaaaaaaaaaaatgagagagagagaatgtatgaatcaatggaatgagtgaggaaaacctcaagtgatgatgatggagagagaaaatgagaagggtgagcacaagaattaggccagcatggatacagagagaaggccctggcatggggctgccatgggtgatgactgggagtaggagctggtggaatacacaggggccctgggaccttggaactgggcacttcaatctcaaaggctgggcttgggggccaagcaggcaggctggggagggccccatgaagaagcctacccaaagagctacccaaaaagcctacctggcacccagctcaactggacatctgtcattgaacagatggggaaactgaggctcagaaaaggaaagaaccttgaggaggtctagtcctctcctgatatgaaggccgccctccccacaacacacacacagctaccccagattggcagagaactggaatgttggataatccacaaattaggttggagcgggggcgctgtagagttgaggatctgagatttggtggggcagaagagctcaggacacacacacaagaagtacctaagaatggggctggggagggattggaggtacagggagaatgagataccagagggcaggggtcgcaaggaataaggaagaagccattgggccctataatctggatgctgggagaactgaggagtgtctgcatattggggatcccaggatggctgaggcctgggggatcaagctatcagcattcgggcagggaccatgaaaaaacagagggtcagaatatgaaagagttccaatgtcaggggttgggaaaattcagaagttcagagattagagagggattggggctttcagaagttcagagattagagagggactggggcttccagaagtccagtcattggaaagtcaggaagttaggaaggtaagaagtctggggtgagaggggagaagtcatggggttgaggcaggaaggcatcctatggcaaagcgggtgagaggttggaaaatcggatccagacctgatgctaacatttggcgatgttgaggagaggaatggtgtccactgtatcattatctgttcttttttttttttttttgagacggagtttcgctcttgttgcctacgctggagtgcaatggcatgatctctgctcaccacaacctccacttcctggtgcaagcgattctcctgcctcatcctcctaagtagctgggattacaggcatgtgccaccatgcccggctaatttttgtatttttagtagagatggggtttctccatgttggccaggctggtctcgaactcccaacctcaagtgatctgcccacctggcctcccaaagtgctgggattataggcatgagctaccgcgcccggctcattctctattcttgcctgtaagtttgcagtcttccccagtgtgatacattttaacagaaaaatgtggggacaagaagtgaggaagttatgaactctgagggcagggggcttgcaacccggggggtctcagggccctgggaaggggaaggtcaggggagagggccactgaccgagccgccctccacgatgtccctccagagcgggcggtcagggggctgctcggccagctccaggaggttgtccagcaccacctggccgatgaggtcgtgccgcgagaagcggtcaaagtcatagacgctgaagtgcagtttgcgttgggccagctcggccaggggcaccgagaattgaaacgtctcattgaagacggggttcagggtcttcctgtgcacctggtggtggtgggcgacaggagacagacaccgtgcccataagcccctcctccacaggatccaggagtccagcccccagcccctcctccctcagacccaggagtccaggcccccagcccctcctccctcagacccgggagtccaggcccccagcccctcctccctcagacccgggagtccaggcccccagcccctcctccctcagacccgggagtccagagccctagctccctctctgtgggaacccggtgtccagcccgctgctccggaccttggtctgaaactttttcttgcggtcaggcagcaggtagatcttgacgtaggggtctgagaagccgttggagtccttggcagggaggtccagggcctgcaggatcctcaccaccagctggtccgagccatagaggtaccgcagggcgaagctgatacggccacagggtgcccctgtgcctgcctctccagagcctgggcccccaccgctccgccggccaccagggccagtcccctggtacagctctggcttaatctgcccaatgagtttggctttttcctcgcctccaggcaggggtaagggcagggcaggtggccgctcctcactgctggggtccggctgggaggtcagagtctgctgggtgaggggtcggggcagggctgggtacctgtagggggttggggggagaccaaggtgaggtcagtggctctgatcttcgactgcatgcagagacctgggagactcctccctgcctttccccccatcccccagccaggtggccacaagtcccctcctttgctcactgtgtgagcttgaggaagccactgtgctctctgagcctcagattccccattggtatctggggggcattccttctctccctccctccctccctccctcccttctttccttccttccttctttccttttcttttgagacgaagttttgctcttgtcacccaggctggagtgcaaaggcgcgatctcggcccactgcaaactctgcctcccaggttcaagtgattatcctgcctcagcctcccgagtaactgggattacaggcatgcaccaccatatccggctaatttttatatttttagcagagatggggtttcaccatgttggtcaggctggtcttaaactcctgacctcagatgatctgcccgcctcggcctcccaaagtgctgggattacaggtgtgagccaccacacccagcctcattctccccatttcaaagctagctccagcccagacctgtgcataaaccagcttccagtaacctcttttggacctcaagctggtgacccaggatgcttctccatggacccctggcagaccttctttgaacgctcttctgcccttctcttaatctccccggctgtctctcctctctatccccactgtcctggtcacagctcaggccttgtcctctcctggactctcagcctccagtgtctccctccagcccactcccatatggccccagagggttccttctacacccagagctgagcctgcccctcccctgctcacagccctcccatggctcctcagtgccctcaggacaaagtcccagaccctcaggcgggcactcaaagccccatgtggtctggtgtctgtagtcacatctctgaagttttctttttcttttttctttctttcttttttttttttttttttgagatggagtctcactctgctgcccaggctggagtacagtggtgcaatcttggctcccaggttcaagagattctcccgtctcagcctcccgagtagctgggattacagacacacacaaccatgcccggctatttttgtttgtttgtttttgtatttttagtagagatggggtttcaccatattggccaggctggtctcgaactcctgacctcaagtgatctgcccacttcggcctcccaaagtgctgggattacaggcatgagccactgcgcccagcctgaagttttccgtttttcaaacttattctcatgccttggtgactaaggcttggtgccctggctgtccccttggtgtgggctgtcctcacaatgcactaggatctcgttctcctcttgtctttgcctgggcctctcctttcacctggaatgcccaggtcacagccctgcctctttgccttcccaactctccctcagcctgcaggtctcagctgagacatctccacctccaggaagctcccagccttctcccagttgcggttccctgagtcgctttcctgtctcaccaacctggctacaccaggacagccagtctgggggtcgcctcccctgcgctgtgagtgacaggagggcagagtctggtgttttcctaacacccctctcaggcctagtttatatcagtgctcaatatacatttacatgtatattgagaaataatgaatgaaggaactccaggtcccactaccaatcctggcttagggtgaaagggggtgaactgccttgtgccacaggggacttggggatccaaccttattctcctctactttcctgtcctaagtcctgcccccagtctcctccctctggacccaggaattcaggcccccagtcccctacttcttctggtccaaggggtctagaccccacagccccaacctccctcagatccaggagtctagggccccagcctcctctttccctaagatccaggagtcaataccccgattcccctccaaatcccgaactcataagagctatagataggaaagagacacagaggaggagcagaagttcagagtggacccccaacccagtatcctctctcacctggtagtgggtgccaggcttgtgacctgctgatgtgactgggcactgggcaagcccccaccactggggggcagcaggagcaacccagagcctgctcccccctcagagggcagctcaggggatgtttggctcggtttgaccccagcggccactgctgctgctgcagcctctggatacgagtccatgtccaagtaggagggctcaggggtgtcagaaccccccaggctgcctggctccagcagctcagcaaagggtggatggtgggcggcatgggcatggtggtgtgggccgcccagcagaggatggccacccaggccagccgccaggtggtgcccgcctccgcctaccaggcctgccagcccgacaccagggcctaggtctttgcgcagggggccaccgcccactgccgagcctcccttgtcccgccagggcacccagcacaacttccaggacacgaagagagagacacccagaaggacaatgccacagaatgtcacgatgaccgacagcaggctcacggagatgtctggagagaacgaggacagaggtaggggtcaggatggggtcacagtacatcctccctctgctgtccccaaagagttaacccttcatatttgccatgcaattgtccatgcaattgcaagtgccaggcactttacatgtattacttaatttatgttctacaactctacaaggttaagtattgtatttttttaaagagatggaatctctgttactcaggctggagtgcagtggcataatcacagctcactgcaccctcgaactcttgggctcaagcaatcctcttacctcagcctcccaagaagctggaactacaggtatgtgctatcacacctggctaacttttaaatttttctgtagagatgaggtcttgctatgttgcccaggctggctcgaactcctggcctcaagcaatcttcccaccttggcctcccaaagtgctgtgattacagatgtggccactgtgcccagcccagtagttctatatgaccattttaaagatgaggaaactgagacacagagagattcagtgatttgtttaaggttttacaagtaataaatgacagttctgagatttgaatccagcagtctctctccagattttattctcttaatcactagactttgctgcctctctataatagaacacaacatgtgaggtagcaccaaggtcctccaaaatgctcagagatggtcaaggaagcatggaccctgcacgacacagttaggcagggcagggtttaaatcacgcttgctgtgtggccttgggaacatatcttgaccactctgaaccttacatttcccattttccaagtaggaaaaatcagttcttccctcttacagtagtttgaaggaatgcagaaggtaaatcacatgtggaagataataacaaacatatcttgaggggtgattacataccaaatagctcagtactttatagagatcaggttatttaagcctgccaggcactacatgaggttggcaacatatttatccctgttttccacaaaagaaaactgaggtctgtatacccatagttacctgctcaaagtccatagctggtaggtggtagagtcaggatttaagtctgggaagcctggcttcagagcccatggtctttactatgatgctatcacacctcaacgcttcccaataaatggtagttcaaatgtgaatttttattagaataataaatcctattgctgccactatgtgcgtccaacaccatcaacaagatagctaacacattctgaatgccacatatgtgctgatatgccttgcagagaaacccaagtacagaattgttcttacaatcaaaggttttaggcttcttcagtaattggtaccaggagtggggtttttcagaaatgaccttcaaggaatgggaatttgttttgaaatggacttctgggtgttgacaaagtgaaagacagggaaaatccctactcctgacagacagtgggttatggtggggaagcaggtagctaggccattgccggcaaggacagctgagtggaatggctgtgtccagttatattaggggacacacagcaggaaggggttgccttctggtcctgtactgcttagtgaagctacagtggtgtgtgacattaatccttatgacattatataactttggaatgacttatcccattttacagatgagaaaacaggctctgagagagaggaagtggccctgcagggacatataccaggcactggcagaagaactctgggtttccttcccccctccctcttggggtgctttttttttttttttttttttttttttttgaggcagagtcttgctctatcatccaggctggagtgcagtggcatgatctcggttcactgaagcctccacctcccaggttcaagcacttcctgtgcctgagcctcctgagtagctggaacaacaagtgggcaccagcatgcctggctaatttttgtatttttggaatagacggagttttgttatgttggccaggctggtcttgaactcctggcctcagatccatccacctcggcttcccaaagtactgggattacaggcatgcaccaccatgcctggccagagtgctccttctctttttttttgagacagagtctcgctgtgtcacccaggctggagtgcagtgatgtgatctctgcggagtgcagtggtgtgatcttggctcactgcaagctccacctcctgggttgatgccgttctcctgcctcagcctcccaagtagctgggactacaggcgcctgccaccatgcccagctaattttttgtttttgtatttttagtagagatagggttttaccatggatggtcttgatctcctgaccttgtgatccgcccacctcagcctcccaaagtgctgggattacaggtgtgagccaccacacctggcccagagtgctcctttttaagtgaccaacactcactgagcattctgggtggcctgttagaaaccagaggcaaggactttatgagcctcctgaacacaggttgagttgagaaaacagggtcattgtggagaaaaattaaacagatgctttcccctaccgccagcctgattcagaccctgtccaactcaaaacatgaatcccacaaaccctgacagattccccattcctgtctgcacagactggggagttatttgggcgtggagaggtggtgtagttgcgcagtagaagattcaccttgcccagagaaaggtttggcccttgatcagctcccgggagggaacctctaagcccatggaatgtcctgcctgattagagtgtctttgtttacctggggccttggatcatgtggcatagtctatgttaacactgtgatatatgctggaggcctccagctcagcctctggaggagctggagactaaagtcagccacaccagcaatcagtcacgtatatgaggccgacccccaataaaaaccctgcccaccaaggctcaggtgagctttcctggttcgtaatagactgtgcatgctgtcacatgtcgttgctgggaaaattaagcactgtccatgtgactccactgggagaggatgactggaagctcacacctggtctgtcctggactctgccctgggtgcctcttccctttgctgacttcagtctgtatcctttcactgtcataaaccataaccatgagtataacagtttccagccaggcgtggtggctcatgcctgtaatcccagcactttgggaggctggggcgggtggatcacttgaggtcaggagttcgagaccagcctggcgaacaggatgaaaccctgtctctactgaaaatacaaaaaattaactgggcgtggtggcagacgcctgtaatcctagctactctggaggctgaggcaggagaatcacttgaacctgggaggtggaggatgcagtgagccgagatcccaccattaattacactccagcctgggcaacaagagtgaaactccatctcaaaaacaaacagacagacaaacaaaaacagtttcctgagttctgtgagtcaatgattctagcaaatcattgaacctgagggtggtcatgggcacctccagactacagtgctgtactagactatgcaggattcagttctgcctctgctaccattgagcctctgggcaagtgactgctgctctctcggccttatccctcatgactgtcacctggacatcctgcacatgaggtgccagaccctgccctggtgctcagcaagtgtgactgtggttgtaatcactcagcacatgcttcctctggtcaccgtttcctcatctggacaatggcactcataatgtttcctcattcccagaaccctgctgctttctagctgtgtgaccttggacaggtcacttcacccttctcagcctcagtttcctctgttgaaaatggggattatatgttccacaaagggtcactgtgagtaatcattgagatgtgcagaggacctcgcatgctgcctggaccacagttggtgctcagtaagtgaatcccagcattgttctaagttcttcgtaggtgttatatcatttaagtctttcatctgctctatgaagcatcccttttattatccccattttccagatgaggagactgagtcccagaagaagagtcacttacctacagccatgcagttattaataaagtgagggagatgggacttgaacccaaacaagtcagtctgactcaagagcctgacatttgcacaagatgcagagagatatctgaagggggcatttggtggtggtagtcggagggaggcccacagggcaaaactcaaaaagcagaccacacagctccttccccttggatcagagatttgggagaagggcagcagcaggcagaatgggggcaagacgctacgagggactgaccccacaagcaatggaaagctgagcagttctgctccgagtctcctggccatagtgcaagcagggggctggccaagacaggcaggggtgctgacctgcatctggaccccggggatagcctcggattcggtcattgaactcctggcacctgtcgttggtgtcagcatctcggacccgcgcacagaggtccgagaccaggatgagtgcccgccggcagaggtcatcctcgtagtctcctgacatggtggccgtctggtcctgtgtgtgggagggatggggcaagggtgcagatgggaaacagaatgggagtgcagggtgggcaggtgtggagataagggtggaaagagacaccgagaaaaggaaggatgggcaaaggggacagagattaggggcagatggattagggatggagattcgaggaagaaggacaaggtgacaggtattagggatggacaaggaaaaggaattaggagtagacagacaagagggcagaaattagggatggagatagtagcagggactgggtaagtcaaggggacagagatgggcatgagtggagtagaggacagagaacagggacaaatgaacaaggaggaagagatggagaagggcagtgaaggggctaagaatgaggatgcacaaataaagggatggacagatgaggaaacaaagattagggctgcacagatgaaggaacaggagttagggatgagcagacaaggtgccagccattcatcattcattcattcaacaaacatccatccagcaccaactacgccctacgtgctgtgctggttgctgcgaatccagcagagaacaaggtcctggagttccctgacctcccggtgtcacaatccaacgagaggagacatagagtaaacaagcaaacaaaaacacatacacaaaccggtcactgtcagactgtctgtgagaagcgctccacaggacacagctggagaatgtgtcacaaaggaactcagaggggggcggtcagggagggctctcccaaacctgaaggatgacatggagccagccacaggcggggggcagtggcgccaggatgggaaaagcattttaaagaaaagcattttagacagtaggagcaggatgacaggggcttagggtaggaaagcagttggagggtccagggaccaaggaggccagactggggtagacgcggggagggccaggagagaaggatggatgtgggtagagagattggaggtggataggtatggtgggagctgggggtggagaggtggagatgcagagatggggaccaagttgagggagggagagatacagggaggggagacagagataatgtgaagggcagactgaggctccgaagagatggagaggtgaacaggcaggcagaaggaaagtcaaggattgagacttgggatggacagtgacaaggaatgaaccgagatgtaattaattcacgggggcttgagagacgagaggacgagagacggtgaagaggggcaggcaggagtgtgggcagaaatatctttgaaagagaaacggtcgaacgggaggatggatgggtgggcaaggacagcagatgatggctagagatcgcagatagacaaaaggagacaggagggctgggcagacagacatgggttcataagggaaggttcaatgagcacataaatgagaggaggctaggaaggagaggtggatgtggggagagggggaattagtgacacatggctcggagccaggcatcaagatgggttgaaggggatgcaggggaattaggaacagacagaccagggctcacagatggacaggtgtcgtgggggtgctgcagaaggccaggactccaagacaggcatggccacactcacctgcgcttatctctgccgtgtcctgggtggcagccgaggcggcggcgggcggcagcccatgggggttctagggcggacaaggggctgtggacccgttcccacgcgccgggtaatgagagagaatgtctgatctaggggctgaggccgggagaaaaagctcagcttaacagtcacatcttgccctactcgagccagctgcccgaccccaggcgacccactgggagcccggccaccccctcccacctccgggcccccagctcccgttgagggcttagagactacaattcccggcaggtctcgcgctcgcgctgctgcggcttcatagacccggcgctgcaggatctgctgggagttgaagtccttaatgcctccgggctgcagagaggatgggattttttttttttttttaaggttttggggggttaagatgctggggtcccaagacgcttcaggggaggggaacgatgtccgggacttcgaaaagccacggagccctaagtccttaggggccacggaatgaggaaacgatccccccgcgctggggatcggtgggcgaggggtgggatacacccaggtgtttcgggacccccttccagggccacgtgcccctcccccggggtggccagagagcgctgcagcgctcccactccccggcccgagatccacgcgcctctgcatctaccccgcccccatgcgccggggccgaccccagggatttgactggggctggggctgtggcaggaggagggggaggagcggactcacccggagccgccgctgccgccgctgccgccgccgccgccgccgcagccccgcgcgccagccgcggtgccggctcggctcctcccctcgccactgtcgcaggtccgcggctcctccccctgcaccccctccttcccccactccgaacccgcggcaagaaagccgaaatcacttggcctcagcaaggaagcagggagattgcccgggactaaggcagcagagacccagtgggtttccacactggggacccagagatctaggatcacgacgtgctgcttctccagggtccgggggcccagttctccgccccgctatctcacagaggtagaagtccggggaccccaggcccctcttcccaggaacccaggacttcaggccctccaacctgagccgctctgaaggccggtggtaggagcggaagctgagactcaaaggtacagtgccacagccaggatagaggtactagcagggacctgggtttgaatcccacctgggccaactcctgcctgtgtgcgcctcttgctctgaggccccgtttcctcatcagcaaaatacacaccataaacttatttcctaagggatccacagtttgaaaaaccggtcagtgtagacaaaacattggtaccaactaggtacttaatgaatatttctcaaaagtagtgagtaacagtttctggtatattaatagcagttaatggcaattgtcatttcctataagtggtgaagtgctaagtgctttgaaagcgttttctcatttaattttcacttgggtgcaattatgacattcccatttcacagaggagacaactgaggcccatggaggttaaatcccttgggtaaggtctagatcaggggtgtccaatcttttggcttccctggactgcattgttgtcttgggctacacataaaatacactaacagtaacaatagctgatgagaaaaaaaaaatcacaaaaaaatctcataatgttttaagaaagtttacaaatttgtgttgtgccgcattcaaagctgtcctgtgctgcatgcgggcctcaggccatgggttggacaagcttgatctagatctacatagcctggagaggtggctcggaggccccctcagtgctctcaatcagtgacatccaaataaatacaacctctaggtaaaaatcaaaggctgggctgacacctgtaaatcccaacactttgggaggctgaagtgggaggatcccttgaagccaggagtttgagactatcctggacaacgtaggagactccatctctacaaaacaaaaaaaccaaaaaaccaaaacaaaaccaaactagtgggtgtggtggcgtgcacctgtagtcccacctacgcaggaggctgaggtgggaggattgctggagcccaggaatttttttttttttttttttttttttttgtgagacagagtcttgctctgtcgcccaggctggagtgtagtggcgcgatctgggctcactgaaagctccgcctcccgggttcactccattctcctgcctcagcctcctgagtagctgggactacaggcgcctgccaccgtgcccggctaattttttttgtatttttagtaaagacggggtttcaccgtggtctcgatctcctgaccttgtgatccacccgcctcggcctcccaaagtgctgggattacagacgtgagccaccgcgcccggcctagcccaggattttgaggctgcagtgagctatgattgcaccactgcattccatccagcctgggcaacaaagcaagacccccatctcaagaataaatagccaggtgcggtggctcatgcctgtaatcctagcactttgggaggccaagtgggcggatcacttgagctcaggagttcaagaccagcctgggcaacatggcaaaaccctgtctctacaaaaaatacaaaaattagctgggtgtggtgatgcatgcctgtagtcctagctacttggggggctgaggcagaaggatcacttgaacccagaaggtggaggttgcagtcagtgagccaagattgtgccactgggctccagcctgggcgacagagtgagaccctgtctcaaaaataaacataaatatgaataaataaataaatatttagagcaagaaataaaaatgtcaaaataagtaagtaaataaaagtaaaaattgcttgctgcttctgcaaatacaactttaagcacgcatcctgggccctccctctaattagattacaccctacccctattgctgcctatgtgtacattttgcagccattatactaccacagaacccccagaaatgcctcccaggtttgccgagtctcttccttgtggcttcttgcatccccccagatggatgtgtgtttacatccagggaagcatgtgcgggtgtaaacctacagaccacgagtgcaggtccccatgccaactctaacagcccgacccttgaaccctgctgggcctgcccagggtccacaggtagccctgttccacagggagagacacgcagtgatgcacacactcagagatgggcacacagatgggcttgccacgctgccatgacacgtttccaaagagacgctcggattccgaggctgcccaggcattgagaggcagccgtagtgcactggttttctgtgtgactttgggggcagagcactgggattcaaatcccagctctgctcccctctctatgcaaccttggaggggttacttagattctccatgcctcagtttccctctctgtaagtgcagataataatactttaaaaaatcatactctggctgggtgcagtggcacatgcctgtaatcccagcactttgggaggccgaggctggcagatcacctgaggtcgggagtttgagaccagcctgaccaacatggagaaaccccgtctctactaaaaatacaaaaattagccgggcgtggtggcacatgcctgtaatctcagctacttgggaggctgaagcaggagaatcacttgaacccaggaggcagaggctgcagtgagccaagatcatgccattgcactccagcctgggcaacaagagtgaaactctgtctcaaaaaaaagaaagaaagaaaaaatcatattgtatctcactgggttattttgagggttaaattaaattcatggaaggtgcttaggaaaaatggctagtgtttagtgttgtcataaataaaaattaaatgcatttgctcatttaaactttagctggacttgacaagtgaggaaattgaggctcaccaagggaagcgctctgcccaagatcacacatctggaaagtgtgagtggagattaaaaactgtatgggtctggaccaagtgcagtggctcacacctgtaatcccagcactttgggaggccaaaggtgagaggatcctttgagctcaggagttgagacttgcctggacaacatagtgagacctcatttctacaaaaaatacaaaatttagccgggcatggtggcacacacctgtagtcccacctgcttggggggaggctgaggtgggaggattgcttgagccccagaagtcgaggctgtggggaaatggaggctgcccagagtcccgtccttgtgccttcttgcatccccccggatggatgtgcgtttacatccaggctggagtgcagtgagccatgatcgtgccactgcactccagcctggatgtcagagtgagaccttgtctcaaaacacaaaaagaaaaaacaaaaaacggagtggatctgaatccagagcccttgcctttagccaccatgctgtttgcatctaggacccatttgaggacttgcatgctactgctgctaggagtatagaacaatataaagaacaccggacagggagccaggagacagagatagaatcttccatattcattcaactcgattcatgcagtcatttgagaaatactttctgagcacctaatgtgtgccaggcatttttttttttagacagcagggattcatctgggaacaaaatagactaaaattccagggttggaagagctcatggtctagtggaagagacagaaaataatcaaataactacacatactaggatcctcatactaggatcaatgctaggaaggaacatccattgtgctgtgtgtttgagagaggtcagagaagttcctgagcaagtgacttttcagctgagctcagaaggatgagtaggcataagccaggtggtgaagatgagggaggggaggggaaatgctccagggagaaggaacagctcatgtaagacctgggggcaggagggagtttggcaccttgagggctgtcaagcacacaagccccgtaggagtagcactttgttttgttcatagctgtgtcccagctgcctggcacagtacctggcgcatggtaggcactcaatacttattggttggttgaatgaatgaatgaacatgtgaatggataagtggaggaatgtgtgaatctatgatgtattgatggatgggtgcatgactggatagatgctggaaggatagatgaagggatggacagataggtggatgagtgaatggctggatggataagatggatgttggaggaatagatgaaggaatggatagatgaaagagtggatggttgggtgcatacatggatgattggatggatagatgaagagttagagtggggatggatagatggatactgcagaaatagatgaagggatggatgagtgaatggctggatggatagaggatagattggtggatagatggatggatgttggaggaatagatgaagggatggatgagtggatgagtggatgagtggatagttggatgggatggatggaagctgcagaaatagacgaagggatgaatgagtcagtggttgaatggatagaagatggatggatttgtggatgggtggatggatgttggagaaaaagatgaaggaatggatggatgagtggatgataggatggatggatgctgcagaaataaataaagggatggatgagtggagggttgggtggatggatggatgattggatgggtagatggagaattagataaaggatggatggattttggagaaatagatgaagggagggatgagtggatggctaggtgcagggatggatgattggatgattggatagatagatgaagagttagatagaggatggttgggtggatgttggagaaatagatgaagggatggatggatgggtgactgattgaatgagttttcacaaatacctacagattcacacacatatgtgcctggaggtagatgcagatacactcagaggcatgcacacatgtgtgtaaatacagattcacttgttctcctggtgctcctcctggagagagcaaacactgagaatggggaggtggggagacacaccttttggccagggctatggccatccctgccaccactgcggcgctgacagtatttctggaattggaggaaaacgctgattcaggggtgtgtgttttagactgggcaccaggccaggaagtgggacagggatggcccagagagatggattgagtggcagagggaagtcggtcggagtaaggcagagagacaggcaaggcgacagagaggtggagacacacagaagcagagagatggggaaataggcaaagtcatggaggcagagacagagacatagagagaaagggaaggaaagagagatggagacacagaaacagagatggggaaatagagtgatggagacagagacagatgtacagagagaaagacagggagagaaagatggagatacagagacatacagaaatctacagagatgcagacagtgagagacagagatacaggaatacagaaacctgtgatacaggaattcaaattcagacacacactgtagtcccagcactttgggaggctgaggcaggcagatagcttgagctcaagagttcaagaccaacctggacaacatggtgaaatttcagctttaccaaaaaaatacaaaaattagccaggcgtggtgtgtgcgcctgtagttccacctacttggaaggctgaggcgggaagatcgcttgagcctagaaggttgacgctgcagtgagctatgattgtatcactgcattccagcctgggcccttgtctcaaaaaaaccccccacgaaacccaaacccccacaaaaatcaaatgcagacacacagagagagatgaggtagggttccagagacaggtagagagaagggaagaaagataaagacacagagagcaaatggaggcacagatagatggagacatagagtcccaaatcccagagggaagaagagagacacagaggagcagagagagatgcagaggaggagggacagtgacatccagccaaagctagatgcagagtcagaggactggaaaggaaattacctccttttgggtgcctccttggtgcctggctccgatttgggggtgctgctgtaccttgcttcacttaagcaccaacagcccttgaaggtagcattgaggaaggcaagagataaggaagacgaggctcagagaggggaagacatttgcctgacattgcacagcctgggagcagcatttgatgctggtctgtttgatgccagagcccatgttctcttcttcaacttatgttggctcgtgaagaccaggagggacagggcagatggggttagggggctactgagtgtgggtcacagaaatagagggaaataatcatgtattcattcaactcatgtgtcctgaacttcccagaagcctggcccttgtggcgtgatgccagagagccagagatgagtcaggaaacaaatttctgagcaagacagatggggcggagggcagtgttcagaggtctggagaaggagcagataaaaaaacagtcggagggaggagacagaaaacacaactggtaggaggatgagtcagagagggcttcctggaggagagggcacttgagcttcttattaaaagatgagggcatttggggacatggggaaaggttggaagagcattccaggcagaagacacagcatatggaaagagtggagacagaaataaggtgggatgtgtgggagggattatttatttatttatttatttatttattattttgtttgagacagagtcttgctttgtcgcccaggctggagtgcagtggcgcgatctcggctcactgcaagctctgcttcccgggctcacgccattctcctgcctcagcctcccaagtagctgggactacaggtgcccgccaccacacccggctaattttttgtattttcagtagagacggggtttcaccgtgttagccaggatggtcttgatctcctgacctcgtgatccgcccgtctcggcctcccaaactgctgggattacaggtgtgagccaccgcgcctggctgcgggagggattatttatataaaataattaataaagggtaggtggagaatgtttggaggggtgaggttgggagagggaggtgaggttagatcatgcagctctttcagtccaggtgaggggctgaaagtttgtctaaggcactggggagccctgggagggccgtgagcagggcaggggcaggtcagttccgggcacagaaagaccactctggagcctcacttgtggggagaggaatgagggcgagagaatggaggatggggcggccaggaggctgggccaggtgtggtggctcacacctgtaatcccagcactttgggaggctgaggtgggaggattgcttgagccccagagtttgagaccagcttgggcaacacggtgagactccatcttaaaaaaaataaatagctgggcgtagtggtgtgggcctgtggtccccattactcgggagactgaggtgggaggattgcttgagcctgggaggtcaaggctgttataccgctgcactccagcctgggggacacagtgagaccctgtctcaaaaacaaacaaacaaaaaaggaggctggggcaagggtcccagcaggagaggacgaggtctgagtggctgctagagctatgggagtagagaggagaggaaggagaggcagaaggaatagaacttggagacagataggctgtgagggtcaggtgtgcctgtggtcaaggcaatcatgtcctccatcccgctgagataaaattgccagctggaaatggaagacagcttgatgggagagaagcagatgtgaagatgccaggagggggtcagggcccccagaactgagtaagactatttcaatctggactgttttaattgctaataacggaaacgcaaatcaaattgacctaagcataaaaggaagtttattgattggatgagggcttcaggcattgctggatccaggtgttccaatcatctccaggaatccaactgtctgtatctttgggctatgcttccctcgtgttgtctttgctctcaggcaagttatctccctgcatggtgatgtggtagcaccgagagctccaaccctggctctgaccagccccaaaaccacaggggaaaaaccctgttttctaacaggtccagcaaaagtccaaaggttgactttgtagcctagattgattcttaagctcgccactgaacaaatcactgaggaaatcaaggtgccaccacctagaacgaatacttagtaagcaggaacaacagacagtccagagaccatctggatgtggagaaagaggaagagaaagagatacaagtaacagagacaaagactgcaaggacagacaaaacaaataagcgaaggtccagcttcctctcccacaattcctgcagagagctctgcagacccagagaaagggatgctgaacaggcacctacacggctagaccccttctctctagcacgagaggccccgtgagaccccagacccagaagtccaggcccccatcctctcctccctcagacccaggagtccagaccccaggccctcctccctcagacccaggaatccaggcccccacccctccccctccctctggaggcaccatggcaaccaggccccctgcccaccatcccctccccactagagaacccactttcgttggaatctcgcctgtttctaaccagttcctggctggggcagggatgagcagagggcaagtgggaacagaaaggggatgacagaggggagggggcctcaagggggcagtggaggcagctaggagaggatagagatggggcaaggagactggtgagaggtgggaagacagagagagggtgacggggttagggagaggcagaaaacgatgaagacaaggagggacgggggcctggggagatgctggggaaactgatggagactgaagagatggagcccaggagagaaggagggaggaggagggcagagaaatcaagcaaaagagtggtggagacgtggggacagaggggaggaggcaggggggcagagagatggggagagaatgaggaagggaggtggagagagaggggtggggaaagggactctaggagacagagagagataggaggaaaaacagggaaatgggaaagaagggattggggcacacagggagtccctgaggtcaggggaacccagatctccacatggtctcagccttccagttcctctgtaattctaccccggggcttcaaagaggaggtagaggaggcagcggtggggagaaggagctggggtgggtggcccaggcagagcctctcttgccaccttcctgagacatccctcacccaccttcccaggatgcagccagaggtggagcccgtgtgcttccctgccatgggcagccccaccatgcacaggaaggcaggtactgagctgtgtctttgggggaaggggtggacttcctccatccaggcagtgcgtagtagcccgggctcacagtgtggccttaagcgagtcactggcactccaaagtgaaagccatccctagcattcctggattcaccagattcctggagagcggcccccttggacctcaaactacatttcccatgagcctctgcagttccttggccaatgccctggactcagaactacatttcccatgagcctctggggcctaagcaacacctctgaggccattcttctcctaggtaacctcactgtcttgtctcccaccctgagctcagcatcttcccccaaagctgctctcctccttcctggtttccattttcaaatggccccaccgccaacccagtcactggtgccatccttccacctcccacaattccctcccacagcccatcaggccctatcttcctgccctctgactctcccttccccattccttcctctctgtccccgcagccctgtcccaggtctcatcctcttccatgtggaccctctcctcacctcctccctggtccccagtttctctcctcctacctatccctccatggctccagagaggtctctctgacttcctgcagtgatcctggctgtcccttgctcataacacttcctagcttcctgtcacctctaggacagagacccaaagctccagcctggcttttgaggccctgtgtggtctgacccctgctgacaacttcaggctcctagcccagcacttcctgctagcactctgtgctgtagcacagctcatgcagttacactcattcaacatttatggagtagtatctcagtgaggatgcatgtaactgcaggtaatagaaaaccaaactcaggactgggtgtggtggctcacgcctataatcccagcactttggaggccgaggtgagtggatcacctgaggtcaggagttcaaggccagccagcctggccaacatggtgaaaccccatctctaaaaatacaaaaattagccaggtgtggtgccgggtgcctgtaatcccagttactagggaggctgaggcaggagaatcgcttgaacccaggaggcagaggctgcagcgagccaagattgtgccactgcactccagcctgggtgatggagggagactctgtctcaaaaaacaaaacaaacaaacaaacaaacaaaaacacccaaaaccaaaactcactgcagccttgagctcctggctcaagtgatcctcccacctcagccttcgaggccgaacaaatgccctgatggcaaaacaggcgttgtttctctgcctttaggtctcttttagtgcttttgaaggcatctttcttttggagaccccacaatgcaccatctctagcctagactgaggcacccacgtgacatgtaatttatatgtagctccagaaaagtcaagtggagttgagtcgaccagttggctagttttgttgatcgacgtttgttcatttcgattttgctgttttctttgcagcgttgtggaaccaatcacattttttagttgatcaggttgcaaacttcagcataggccattagaaagcccctgggtcccaagcattttgcctgtagtgcctaatggatgaaacggcctggcttgttctcatgctgggagaggagacgtgaaacacgccatctcacagatcattcatagcctccaatggcaataagcgctctttagtcttggggctcaagggaattctgggaagttcttgcaggtgactctcttctcttttgctcaaaaaccttggcccatgctaggcccttcatgggaaacatccttctctctgtcacctctttatttggtaaataccttcttattctttaggtctcactgtggacacctcctctagagagccttccctgattgcccctagaccgggagactgggctttccctccaccttgtaacactttcattgaaacacacattgccctttatctgagagttctgaaagggcagaggtgtgtctcattcatctcttggtccccagcatcctccaaggcacacaggggccctctgagatgcctgttaaaaaaatttaaccagctacttgggaggctgagacaggaagatcccttaagcccaggagttcctggctgcagtgagctatgactgcaccatgaccctccaacctgggcaacacagtgagactctgtcaccaaaggaaaaaaaaaaaagcttgaaatggttgcatttcctcaatttttcaataagtacttatttttaagtttatgcttatgttaatttaattacacatatacatttaaatgtattaaatacatttacatatattaaaatcactgttgtaactagaaatagttcttatttctaatgtcatatttcatgagaaactattgtattcacattttttcacatgcatctttgatgctgctagagttactttttgattcatttaacgcttgtacaaggctattttttaaaattaatttattgtgttgagacagggactcactttgtaacctaggctggcatgaattgacaccattgtagctcactgcagcctcaaaatcctgggctcaagcgatcctcctgcctcagcctcccaaagtgccgggatgataggtgtgaaccaccatgcccggcctataattatttttgaatatcatctcatacctagtacatatttaaatttccctaattatctcaaaattgtatttttttatagttggcttgtttaaattagggcccaaacaaagtgcacacatttcaggctttattcaataaatactaaggacaactataagcctggcactttgctagatgctggggacgaaaacacaagtccctgcccttacgttgctcagaagacgtagggaagacagagtgtaattagggaatcatagaaataaaggtaaaattgcaatactatgagtacaaacatactgtgctatgaggaatggcatcagtggaccctcagggagacttgattagccaaatgagggggaagagagatccacgcagagttacagcattggccaagatcctgcagcaggaggggtcagagagtccaagtcgcagaaaaacagcgtttttggactgcagcaggtgaaaaggacgattgtgcttgatcaggtttaagacactagcacggtctgatcacgtgtggtcttatggtcactggaaggactttggactttattcatcccacagacaatgaaaagtcctgggagggttttgaggaaggggccatagggtcaggtctacatgtcaaaatcctgccttgctggggtaactggagagcgagaggagttaggagaccaggtgagagtgaggtgagaggaaggcacctggggagattgagaacacgcacactggatccagatgcttacatttttatccttattctatcattttgtgctgtgtgactttgggcaagtcacttaacctctctgtgcttctgtttcatcatgtgttaaacaacactacctcggaaggttgttgtgaggatgcaatggaaagtattttattctattctattttattttattttggcactagagtcttgctttgtcgcccaggatgcagtgcagtggcacgatcccggctcactgcaatctctgcctccagggttcaagcaattctcctgcctcagcctccggagtacctaagactacaggtgcgcgctaccatgcccgcctaattttttgtatttttagtagagatgggatctcaccatgttggccaggctggtctcgaactcctgagctcagtcaatctgcccactttggcatcccaaagtgctgggattacaggcgtgagctactgtgcccggccacagtggaaagtattttttaaagtgtttggcatataaaagggacagtaagcacatagttatattgttaagtggacagacttgaggaggggatggctgtgtttgagggatggagggaggccggtatgactggaagaaaataatgagggtaggtatttctggaaggggatcccgtgaaaatgtagatttgaatccagtaggtctgggggtgggccctggagtaagtgtctaccgcacgtgtgtgtgtgagagtgtgcaggagagcccgttgtgaaacatataccagcacaccactgactatagttaaaccaagttgaatgtgttgacttattgtaatgagagacagcacacacacacacacacacacacacacacacacacacacacacacacacacacacacacgttgtctcagtagaagggtgttagcaaggacttattgttagagccgggctgtgtcaggtgactttggggagggttcacgggggtggggctttgctctggatgggagactgatggaaagcacaggcaagcccatgactgggaatcttcatctcattgggaaccaggaggggtagatggagctaatgctggggttaatgaaaaagcagccgtcggctctgagctgggagggggggattttggtcatttttgtggtttggacaatgttcatgtttgttgtgttgagacatgattcaggggtggtcttgtttttgtctcagtccatcacggtcacagagtggccttgcttgatgttggtgttacgggaaatgttttatgttcggcaggagagcaccagggccgggctgtcagtgtctgcttccctccctttcagcagctataacaaagacaccccaaaacacaacatcataaagaagacagaagtgtatttcttttcttttctcccttgctcctttcctctctttctccttcttccctccctccatctctctcttttctttctctccctctctttttgtttttgagatggagtctcactctgtcgcccaggctggagtgcagtggcgcaatcttggctcactgcaacctctgcctcctgggttcaagtgattcttctgcctcagcctcccgagtagctgggactacaggcacacaccaacacacccggcttttttgtatttttagtagatggggtttcaccatattggccaggatggtctcgaactcctgacctcgtgatctgcccgcttcagcctcccaaagtgctgggattacaggagtgagccactgcaccaggctccgtccctccctccctcccttccttccttccttccttctctctttctgtctctctttctccctttctctgtcacccaggctgaagtgcattggtacaatcatggctcactgcaacctctaactcctggcctcaagcaatcctcccaccctagcctcctcagtagctgggactacaggcacacaacatcatgcccagataattaaaaatttttttttgtagagatagggtgttgctatgttacctgcctcagctggtcaagaaccagaattgtatttctctcttgtgtaatgaaaggcagggttgtgggacatcttggcttggtgagaagatttagagataagagttcctcccatactgttgcttgccatatctgaacatggtggaggctgggttattgctaatccacattccagtccaagagaaagggcagagtccaagaaaagcagtaatcttttaagcaaatgactccaaagttacacctctcactccagctaacacttcattggtgagagcatggtcacatggccacacttacctgcaagggagtctgggaactgttgtctctagctgggaagccatgtgctgggtaaaactctaggattgtaggggaaggggaaaatggagtgcatggaacaactagcacttggccataagagagagaccagttagctgatggtggggtggtcaaaaagggtccatatttgagaactgttatctgtgaagttccaatcaggagactgattctgagagtgttggaaaaactgaaaactgggctgggcatagtggcttatgcctgtaatcccagcattttgggaggacgaggcaggaggatcacaaggtcatgagattgagatcatcctggctaacacagtgaaaccccgtctctactaaaaatacaaaaattagctgggcgtggtagcgggtgcctgtagtctcagctactcgggaggctgaggcaggagaatggcgtgaacccgggaggcagagcttgcagtgagccgagattgcgccactgcactccagcctgggcgacagaacaagactctgtctcaaaaaaaaaaaacaaaaaacctgaaaactggattcaagtgttgttactgaagtgatgctgccacagtgaagaagtaagcctggggtgactagaagaggaagcaaaaaggagcaagttcctcctgcttcctcctgccttgcaggctcccactggcgcccctgttaggcagagcctaataggaacccagctgttgaaggagaaatgtggttagtagagtctcaacccaggcatcacagagccggtgtcatggggtggagtttggagctaagagacagtaactcaacatctggcatacaagctattctgggtgtggcatgggcaagcaattggtgatggccatttaagcagaatcatggctgaggagggctcagggcagctgacactgggttctctgtcctcaggagccctccttatggacctggagaccccagaggagatgcaggctcggagcctgggcaggcccatcaaatcctcgtgagttgtccctggcccccatgacctctatcttccgcctccccaaatgtgatggcagtgaaccctgacctcagaggtccctgcctgttcgctctctccctagaaagcagtacctgcggcaggtcattgcagagtacgaggcactggaccgagaactcccgtgcatccggaagttccccacaccaccagcttcccagcccctctgcctctgcatggagaccttggtgagtggacctgtgcccttattttctgcacagttttggtggggtgatgggaagggcacaggctgagaagcagtgtggccagagtttaaattcaggcttttggcttataagctgtgggcttgccaccaggacagtttgctgaaaactgattgtgaatttgtcaaagggtcagtcatgaaatctactgctcatgtcagaggggagaccaacgggcaaagaaaggggaggctgaggggggcagggagggaggacaaaaggagtcctactaatccacttctgtaaagtttacaaatataacaaaaactcaagaaaaagcccatgtgtgtcgggtgcggtggctcacgcctgtaatcccagcactttgggaggctgaggtgggtggatcactagaggtcaggagtttgagactagcctggctaacatggtgaaaccccgtctctattaaaaatacaaacattaggcaggcgtggtggcaggtggctggaatcccagctactggggaggctgaggcaggagaatcgcttgaacctgggaggtggaggttgcagtgagccgagatcgtgccactgcactccagcctgggtgacaaagtgagactctgtcaaaaaaaaaaggaaggaagaaagaaagaaagaaggaaggaaggaagggagggagggaaaggaaaggaaaggaaggaagggagggagggaaagaaagaggtcatgtttttgacagattcagtaaactggtcctccctgccttcaatcagaagaggtatatatgagagtcccaggcactcaacaattgactgagaagagctgatgtcaataggtgcttactgtgtgccaggcacaggcctccaaggtaccctctcagctaatccgtgtaactctccaccctgcatacagggattgctgtcctcgttttagggatcagtctccaccccatcactccacttctttgtggctttgagcaagggactctccagcctcccctctcaccccagtcaaggaatgactttctggaagtgacatcatttttcagtgaaatcgtgaaaattttcatttcattttagttcctcagcaattttatgtgctatgacaactgttatcacccttgacatgctaatcacgtgatgcaactgtgtttagtgatcagtccacgtttctgaatgttaaatagattgacaagacatcaaaacccctatgacccttatcttttgactactgaacattcttaaaatgctaatacgaatataaaaggaaaggtgtgtaacttaaatcctggcagaaattttcaagaactttcaggcgcatccattgcaaattgctgggaaagtttttggtagattcgtaaagttggctaagttggtgaatcattcagccaactgttcattgactttggggcaaattggcttggtgagaattgatttttttggagaatgacctagagtgatagtagatgctttcccatctgagagataatctgtcgtctcctttgaccatagcgacagtaccctgggattaagagcgatccttgcccctcaaatgccacctggaactctgtggcaggttctgcaggtggggtctagggtggtgacttctgaacccaaaatgaaccaggaggccacgggctgaggttctctctccgacacccgcagcccgaggaggattttacccacctggaggtgctgcaagccctggaggcccagttaccaggggccatggagagcgggcgcgtgagcagcatccgctttgagaacatgaacgtcatctgtgggactgctgggcgccggaaccggtgagtaagcggcgggggcggggcctggagcgagcgggaggggcggggcccggggcgaccgggtaagagcgtggttggttttagagcgctgagggacgtggccaagagtgaaagcatgaatgggcggggcccggggcgactagataagagcgtggttggtgtaagggtgctgaggggcgggccccggagccactagataagagcgtggttggtgtaagggtgttgtgaggcggggcgacagtggagtgacagcttgggggggcggggccaggagggactagataagagcgagattggtgcagagccactgaggggcggggccaagagtgagcgcggttggaggtaaggtccggtgagatcagagagaaggagggatctcgagtgagtaggggcccgagtttgagtgacccagtagtgaccgggatagaggtctgagcctggaaaggcagctgtgagggggtggaagagactgagcacatagtaggtgtggggccaggggtgatagggtggggacaggcctggagtgcctagggtagagcgcagcctgcagtcgccagtggagggtcgggcctttgggcggtttgagatggagcctcgacagacagtgattaggacgcagaaccaggctaagagagcgtaaggagcctagagcgacccaggcgagagggcagggctggaggggagtttagggacggagcgatggtccgctggaccagggcctgtaaacgactccagggaccaggcagggactcttcgacgatcaaagccagggctgaaacgacctgcgagttccttttccgtccccaccccccttacaggtggctcatcgcggtcacggacttccagacgcgctcgcgcttgctgcgctccgggctcagtccccgcgggcttgcgcaccagatcgtgcgccacgacgacctcctgctgggcgactaccgcctgcacctgcgccgctccctggtccggcggcgcatgctcgaggccctgggggcggagccgaacgaggaggcctgacgcccgggcgggccccggcagcgcttgcgcaccgccccgcgggctggggccacccacccggagccccggaggacagggggcgttgccttcccaggaaggaggcggggccggctcgagggggtggatactgtgagtttaattataaagaatgacctggtacaaaagccatttctctctgcaaaatcttggtggggagtcaggggaagggaggtgatggggggtaggaatgaacccccatgttataatcccgcgtccctaatcttcctccagtccctgtacgtggacgcctgggtcccaatcccttgagggatgaactgaagcccgcgaaagggaagacctgggcaccggggctttcagcgcgtgccgagccctgtctcagcgagaatcagacgtcctcatccgcccccctcctcttcccctcccacccccccttggaagacaattctcgggcttttatttcaggttttttttctggatttttttgtgtgttctaggggttttgtgttttttttttctgttttttatattttcttcttttgttattgttcctctttttgctttttctctcctctccaccccgcgctgtccccgcattcggtccctccccactccccaccccgacctctcctcccccccccaccccctacaccctccccaaccccgcggcacccatccagaatgaacgagcccttgatagacgggcgccgcgcaggccccctgcggactgggggcatccgacaagggggagggggcgggtaggggtccagcgcggcctctgcccctctctcaccacccctcccccctcccacgaccctcccacgaggttccccgcagatccctgacatggtgaggggagggggcttgcagccccctcccctcatggacggagcgcccccccctctcgggggtagggggcagcagagggggaatgggcttggggaaggagggggagctcccttctttggcagctgaacatgggggggggacctgagggcaacgccctcccccctttacccacagcaggggagggggcttttcagggggaggggtggcttaacattcccaagccccgggaataagcggagagaggaagcgtgcgggaaggaacagccatgctggagggagagggagcttcttggagtggacaggttaggagagggcaatcttcgtgcaaaagggatggacagatggcccaggaaagacagaagagggaggatgtgaggaagggtgagggctggaggcagggagaggctcgagtgtggaagcatggtgagcaggaagccagtgtgcatagggtcttctctcaccaggaagagaaagagcttaaggaggtaagagaatccgaatgagaatggccgcaagagctgcttgtcaacaggaataaaaaataagcgtgtcaggaaaagaaatgacagttacagcccaagagtgcatggaatgagatgagtgtgcaaaaggaaagaagtggtagagctctcatccaggtagaaaagacaagatgcggtgtgcagccatgtcatggtgcgcaagaacattattaaaggggagaaacaaggcttccggagagcactgaaaatgctgggggggggggcgcgtgtgcaaaagcaagtgtgcaagagggttcacaaaagaatcaaaaatgcagaagggcaaagatttcaaacagaaaggggcaagggagtgggagcctggcaaagaagaagagaatgagcatgtgtgagagaaacagtttctgggaggcaagtgtgcaaaaggcgtgaccaaaagtgacggtgcaaaaggggcaagagggaaggcggggggtggggggctaggagtgtcatggtgagaggggagagttggggagtggaagaatctggggtttttaagaataagaagggaaagtgcttcaacgtaagaaaatggaggtaagagtgtgtcaggaggggtgcataagatagcaagtgtgcaagggctgagcaaagagcagggcactccagagaatgaatgatgtgcatggagtctgtgagggggagggaaaatgtgtcccaagtgtgtctgcaacaagggtccagagcgagcggggaggaggagatgtgaaatggagtgtgtaaaggagggccctggtaggggaaaagtgtgtaagcagcaagaagcagagaaggaggcatggagcgtgagaaaggaaatgcagcgtgtgcgaggagagcagagtgtatttgagcgggcctcgccagccagaagcaaaggcagaatgtgcaagacagcgagagggcaaatttgtgcaaaattgcagcccggggacgggaggggagagaggtgagcaggcgtgcaacggagcgtgcaagaggctgaggggggcagctgtgtgtgctggggagaggggaaggggggagagctgaggggcctggagagagtgggaagggttgttagaggggtggcaggtggtggaatccgagggcacccccttcccctgcggcctgggggacagtccccatccaatcgggctcagggctgaccctctatggctctgtctatcccctccccccagaataggcccttccctccttctcaattcccctctgtaatttctcctatcccccctccgctccccgcttcacacacacacacacactcttgtgtcagctgccccccttcagtgaggtgcaaatgtccggcctggattgggccacctggtgacctctggccttgggagatgagggcagggcgcagtttgaacagagtccctggcccggggagagaatgacagtcaggggtcagaggtcaagaggccagcaggctcaagagttctgtggacggggctggtccgtccaggccagccatcacctctccaggaagaatttgagagcccggtcgatgttcatgcggtggcccaccctggtcacacctagatcgacgtagtcctccttggtcaaggcgggcaggtgggagccatcgatctcgtggtccaggaactgggctcggtgctccgccaaacccagccactccagccaatcagccacgtcgaacttggtccagaaccccagaggtttagcgccaaacggcttgtccgggggcagcgagagcaggcgggtcggtgagagggagcgcgaggcccctgacaaggctcccccgagccccccggatatccccgggtgtggcggcacaaagactggggcgaaggggtcagccgagcctcctgcccctccagttggggagccacggatgtcaaagaggcctgggtagaggggtccggaaggcaggatgggcagggacgagggcctgggcgcagggctgaccttgtgctccgaggcgggcagcagcgaggggctgggggcccggcggagcagagggggccgcatctcgaactccacgccctggaggtggcgggtggacgtggaggaggaggaggctgagggtgaggtggcccctggggccgcagcggctgtaggggagacccctgttccggtggggagtggcggcagaggtggtttgggccagttctgaaacaggctgctgacaggcttggagaggagtgaggactgggagtcgtcggagagtctggaatgtgacaagggggcagtgggggaggacagggatttagggggcaagggcaggggtgagaaagaggcagaggtcaagatatagggagagaggaggagagacataagggtagggggagagacggaggagagacgggaagaaatggagggagcaaggggtaagacggccggccgtcgaggaaagaaatgaagggagagaaagatgagaggacagggagagggcgacagttaagagagatgaaagaaaaagagacattaagtgataataataataatcgtcaccgcttactgatgctcacgtgtgccaggcattgttctaagtgctttacatgattgcatctcagtttaatccccacgacagccctgatgcaggttactattattatcagcacagagaggttaaataacttgcctaaggacacacaggaagtggcagagcccggttatatggcaccaaagtctgagctcttcaccactattctatactgcctttcaggttatggccagtcgtagcagagtgaaagatggggagacagtgagagagagacaaaaagagggtgagcatccaggggagagagatggaagggacaggggacacagagagagagagatgaagagagggagatgaaagagagaagaaacaaggggagaaaaaggttcccctcatccctttcgttccctcccctccagcactgtcccacctcagggcctttgaactggctgctccccctgcctggctcactcttgccctgggcagctgctccctctccactttcattactctgcccaccttgcctgttacatgagagaccttctccacccatcccattgtggtagctttttttgtaggatggttgcaattattttgtttactgccccgcccccactcctatgtccctagactatgagccctgtggagttgcacagtctttgcctgtcctgtccagcaggggatcccatcacccagaagggcactctgcacacataggtcatgagtcaataattaatgcaattgttgactgaattaagcatccttcctgttgctgctacaagcagtggaaaaaaaaaaaaagaaaagaaaaaaaaaatcctcttctctaaccagaatacttaagaatagtcaaggaattgcattcagttcttaaaggcctaataaacccacatttgtttgtttatttttacagcgtaggagcattgattcaagttgctctaataatatacacttcctttttcttttctttctctctctctctctctttttttttttttttttaagacagggtctcactttgttccccaggctgcagtgccttggtgtcatatcagctcactgcagcctcaaccttccaggctcaagtgatccacccacctcagcctcctgagtagctgggactacagaggcaggccactgtgcccagcctcctttttcttttctttctttttttttttttttcaacctgggagcatagatttaagttgccccaaatatacactccctgaacccacatttgaaggtcagacacatttggatagcagaccttcaaacagaattcaagtgaactctgtagatggacaaggatatttaaaacctgctcccaaccctctgtgtatctgaagcagaaatgtaactctactttctctaggactagaaggtcttgaatgggctcgaattctgcgacgatgcagctgactggctgctctgggaagcatctgcatcatcccgtatttccccacgtagaagttgctgggctcttgttcgaggccccctcttcccccatcccatgttacaacaatggcacacactaaatcctctcaaaaactctttgggctggcactaggccattccacttctacagagaggtggattcatttgcctaagatcacccaggtagaaagtgcagggttgggactggaagctgagaaggtgggctctagaaccacacctataactgcatcctgtcttgaaccacactggcttcaagggactcacagatttcagggactgtcagaaagaagtggcagctcaccaaggaaacaaacataagcaggtctcactccagtctcctttgttaataactttttttttttgagacggagtctcactctgtcacccaggctggagcacagtggtgcaatcttggctcactgcaacctcggcctcccgggttcaagttattctcctgcctcagcctactgaggagctaggactacaggtgcccaccaccatgaccggctaattttttgtattttttttagtagagatggggtttcaccgtgttagccaggatggtctcgatcttctgacctcatgatccacccgcctcagcctcccaaagtgctgggattacaggcgtgaaccaccacgcccagcctgttaataactttttgttcatcatgggatgtaggttgtgatggtgatgggcagagacaacagaagctactgaaataaatggaaatttaaaggctggacccagtggcttacacctgtaatcacactttgggaggtcaaggcaggaggatcacttaagcccaggagtttgaaactagcctggtcaacgtagcttgtctctacaaaaagttaaagaaaaaatggccagggccaggcatgctggctcatgtgtggaatctcagcactttgggagaccgaggtgggatgaatcaccttaggtcaggagttcaagaccagcctggcccacgtggcaaaacccctcatctctactaaaaatacaaaaatttgccgggcatggtggcgggcacctgtaatcgcagctactcaggaggctgaggctggagaatcgtttgaacctgggaggcagaagttgcagtgagctgagattgtaccactgcactccagcctgggcaatagagtgagactctgtctcaaaaaaaaaaaaaaaaaaaaaaaaaagaagaagaaaagaaaaattggccaggcatagtggcgtgcacctatagtcccagaggattgcttgagcccaggagtttgaggctgcaagtgagctatgattacaccactgcactccagccgggtgacagagtgagaccctgtttctaaaaaaaaaaaaaaagccaggcatgttggctcatgcctgtaatcccagcactttgggaggccaaggcggatggatcacctgaggttgggagttcgagaccagcctgaccaacatggagaaaccccatctctactaaaaatacaaaattagctgggtgtggtggcatgggaggctgaggcaggagaatcgcttgaacccgggaggcagaggttgtggtgagccgagatcacgccattgcactccagcctgggcaacaagagtgaaactccctctcaagaaaagaaaagaaaaaaaaaaaaagaaaaagaaaatatttgtgaaagcatgcttctgtgacagcaaactcctgccaacctggtttctgtttcctttctgccaccctgagaccctaaagggacacagccatgccatcaacacctctggcctcccttgttggccaccagcccccgcttacctctgccgctgcagggaggaggtcctctcggggacatagctggctcccccgtggtggctgtctccgcctcccccactgcctcctcgggcccagggcagagcgccgccagctgccgaggagcccccaaactgctgaagcttggagctgagttcactgatgatgctggcttttactgtggccaaggctgaggcctgaggctgggccaagggcccgggcagaggtggtggcggtgggcccgggccctcctcccagggcagcagcttccggggcagagaggaggccgtcggcaagggcaccggtgggacttctggctctacagccaccggaccccccgccacgcctgccgtggggggtcctgaacaagcacgcagggccagcagcccatcggttccagcccctgtcaccgagacggtggggctggtgggggtaacagggtctcggagtcccccgctggggccaggccgcaggcctccgctggctcctagcgcccggccccggagcttagagggagtcatgagctgaggagggtatggcgggccgggagtactgctgcccccaaaggcctggccgtccaggtaggccacataggtgtccagaagctccggcccactggccacaccggccccagccccgcccccaccccctgcgctgccaccaccttcggcagataggctgctcagcgtggaggcgctgctgatggtctccagtgggtggtcactgctgctccgactgtccacctcctcgatgccagaatccgtgccaggcggagggtccgggccaggctgtggggcagcgggagccggtgctgctggggcaggcgggcctggtggatgggggtccccaggagcggcggaggccccctgggtcagggtggccacctcgctgtcataggatgtcaggctggatgcggtggagtccagggtgggaggggctgcggccacagccgggggtggcacagggggtaacggggtggcaggggcaggtgtgtcgggcagcgggtggggaggcccaggcgtgaggggcgactctggcttttcgaagctgttggagaattccagaggcggaggcagcggttccacgaaaaggaattcgccatcttccacatccaccgagggggcgggaggcggcaggaccagcaggggcagcccgttctcttcgctggccctcggggaggtcggggaggggggcacggaccggcgtgggctgggcggcgggacccccggcccgtcctccgaggggggaccccttccgctcgtcacaggggcccggggctggcagttttcaaggaaccgcacgtgcagcggcagccgctcgggttcttcgggggctgcggacctccagggcttgcttactccggggtgcggggccgggggctccgtccccagctgcagcaggaggggccccaccccgggagcggtgggcggcaggcggtgtagcagggaacgccgggcggcgggcgggctggcgggaagggacttctcctggctgcccagcccggccctgtaccccagctcccggcgcgcagggtccggcggggaggccccccagagacgcagcactggctcgtggtgggcgtggggcgagtggtggtgcggggtgggcggcggggcctcgtagcggggcgatgggggcctgggaggcggctggggggccccgccgccctccgaggactccttcagcgctcgctcgcgggcggccagggccagccccagcggggaggcgggatccagggccttgccggtcagcgggtgcaccaggggtcgcgggggcaggaagctggtgaaggcgctgctgcccccgccacccccgtaggctcggctaccggccccgtagccgccgtagcccgcgccgctgcccgcagactccagtcggaggtagggctcggcggagaacatgccctcgtcgatggatttggagtggcgcagccgcgggcccggggccgcccctgtgcccagcccgccgtccccgccgtcctcgtcccccgcgtcggtggacaggaacagcgtggagcgccggcgcgcctcattctgccagcccccctccctccgggccgcccccaccagggcggccccgaactggctcgtgaagtccagcgtggccgggccgctgggcgaggcgggggtgggcacgggcgagggggacgggggcacgggtgacatggccggggcggggctgggcgaggagccgccgccgccgccgcctcccgtgggctccggctgggtggggggctccgcctcggtgctgctgccctggctgctgcggccgctgctactggtggacggggccttgatgatgatggtggggatggggatggagttcttctccgagggcgcggccacggcgggcggcggctgcggggaggccggggacgtgggcgacggcgcgggcgggaggccgccgcccttctggggctcgccttccaccttggtctgcttgaccagcgggcccttgcggccgcggcccgagcgggcgggcacgtacatggctgcgctggccgcccgcgggggcagctggaaatagcgtagagccgggccctgggaggagccgccgcccccgcccgcgctgccgtggtgcgatggggacggggcccccggggtcgggctgggcccgccgcccctccagcctcgcaggctgggctggggccccagagccaggcggggtggagggtcgtcgggagagccgcctgtctccatctcgggaggatgaggggggtgggcgtggtggtggtggggctgagggggcggggcgtggtggtggtggtggtggggcgggtggtggtgggccgggggcaggggcccactgtggtacaggctcttctcgcggctccccacgcgagtgtcgggaggggagggcccgtcaaaggatgcaggggaggaggcggggagggggccaccagagccagggttgaagggccctccccgaggggagggggtgaggcgccctgaggaggaggggactggaggtgtgctgtagggaggctccggtggggacgtggtgggtggcgggggaatgtcctccgaaccaggcacagacaggctgcggctgaatttcatggctgggggtgctaggtaaggtctgtcatcttctgccgcacctggggagatacagaggctcaaggagggggaccctggcggggagggtctccctgctccactatcccatagaaccgcaacaatactaatgacaagaatggcaccccgtatatgccaggaacttcacgtggactcgcccagctcttccctatttgaggtaaacccaaatctgcttcatacagaggtacaggttgtgcactgcacaactgcaaaccgcaaggaaggtgaggaaactgaaattcagcagaacttcctccccacgccaggagggggcgccattttctaattccgttcaaaggctcagtgaacggtttggggccagcaaaagtggctggagctgggaagggatagtcccctcgtgtttatgcatagatgcgtgtttcttttcacgtatatgcgggaaagaaatgcaaccagcacatcaaagctgtgattctacagagagaaccacttatgatgaggctaaagtttaaaagggattggatctataaaaaaaaaaatcaggtaaacgatgcgagccaggtggaccccacactcagtgggagtgtaagactcacactggtggactttgaacgccaggagttggggaaagctgaatccaatcagggaaaaacaactccaggaggcgtgcaggagttaagtctttgcttacttcactgccaaggctcggtctttgaacctcttctcacctctgactactccctctcaactagtgaccagcttcattcactgcctttctgctgtcgacgcccacgtttatgcctggggccccatcctccgccctgagctctgggcccctatattcaaatacccacacccagctggctgtctcacgggcatctcagactccaaacgctccaacccaagctcctgatctcctcaccaacagactcctcccagcccacggtccctccccaccaccgcagcaaacagcagctctgtcctttcaggtgctaagactgaaaaccttgcagccactcttagctttcttcctcaagtcacccacatccaatccaccagcaaatcctgttgtttcaaaacatatccggaatccaatcccttctcacccctccagagtcaacaccctgggccagccactatcatttcctatctggatagcaatagctgtcacctcctctttggtcccccggcttcccagctcatccccttcaatctagtcccttcacagcagccagagggtttctgttaaaaccgaagtcagctcatgtccctcctctgcttagagccctgccattcactcacctcactcagggcaaaggttcaagtcctcaccatgactccccagaccctgcaggatcgggaccctgtccccccactgccctcatgtccagtgctcacttggcccctgctacacaggcctcctccctgttctgtaaacgcaccagactcagcccgacctcaggacctttgcagaggtagttcgctctgcctggaatgcctcaaccccagggagcctcacgattccccacttcatctctaggtgtttttttttcttttctttttttttgagacagagtctcgctctgtcgcccaggctggagtgcaatggtgcgatctttgctcactgcaacctctgcctctcgggttcaagctattctcctgcctcagcctcctgagtagctgggattacaggcacatgccaccacgcttggctaatttttgtatttttagtagaaatggggtttcatcatgttggtcaggctggtcttgaactcctgaccttgtgatccgcctgcctcggcctcccaaagtgctgggattacacgtgtgagccactgtgcctggcccatctataggttttagctcaaacctgcaccctgccccctacccagcactccctatctctcttaccttactccattattttttttcactctttttttttttttttttttttgagacagagggttgctctgtcgcccaggctggagtgcagtggcacgttctcggctcactgcaagctctgccttccgggttcacgccattctcctgcctcagcctcctgagtagctgggactacaggtgcccgccaccacacccggctaattttttgtatttttagtagagatgggattttaccatgttaaccaggatggtctcgatctcctgaccttgtgatctgcctgcctcggcctcccaaagtgctgggattacaggcgtgagccgctgcgcccggcccactcttttttttgttttccatagcacgtacaactgctaacatactagataattttcttgcttattttccttataatccattatctgtcttcccctgctataaggcaagcccatgagggcaggaacctttagtctgttttattcgctgacgtatccccattctagaacaattcctggcatgtggggagcgcttggtaaacacttgtaaaatgaatgaatggatggaatcgggtataagagaaacaaccagaaagctgtagcgggggctttagctcactgcatccccattctccagatgtagagccagaggcccagagaagtcaagccacctgccccagttcacacagctgggaaggaggggagccaggattcatggccaagttcacccatttccaaagcctgaactcttaacccaatttgatgaaactatggtctctctgggagcacagaacatttccaagtctgcttgcttttcctgaactgtcacgttcctggcctcccccagcccccacatctcttcttctgggtggcataccgatagatttttgccggagcatcaacccaggtcctggaggcaggaaagaaggacgctcgtaacttggctgggcacggtggtggggatcgaagctcgactttggagcggcagtcagagggggagagagagaaaagatagagagagatcagtcagcgcagaaaggcttgtggcttcactatacggctgcccccattccttccctaagcccctgccgtaagggagagcagtgtgaagacggtggaaggaggccgggcaacgtggctcacgcctgtaatcccagcactttgggaggctgaggcaggaggatcacctgaggtcaggagttcaagaccagcctggccaacatggcaaaacctcgtctctctactaaaaatacaaaaattagccaggcatggtggcaggcgcctgtaatcccagctactcgggaggctgaggcttgagaatcacttgaacccatgaggtggagaggtggaggctacagtgagccaagatcacaccactgcactccagcctgggcgacagagccagactctgtctcaaaaaaaaaaaaaaaaaaaaaaaaagaaaagaaggcgaaagggaattctgcgggaatgaaaagcctcaagtctgggcaggaaggagaaagaaaggagaagaaagcagattttccatcgactcttgatctgcttccttcctccagccactgcccacatccaggtccccaccagtgttctccgggatggagcagcctcttccctcatctccctgctgccatccttgatcccccaccctgttccagtctgttttccacacaagagtcagaggcatctttcaaaaagcatgctattgcccctgcttgaaatcccatgtcagttaggaggagatcagaggggaccaaactcccaactctggtctacaagaccctctatggcaggcactgctggtgcccctgcagctgccctccccctggatgcagcatcccatccctcacccactgctgggagggtcacctgcctgcagcccttaagaatcaccctccttcagagtcctggactcgcccagtccgttatgtgtccctgcttcctggagcagcccacagcccacgatggacggatacggaggcccgaggcagcactaaagccggggtgcccagcctgaccccatgggttcccactccagcgtgaaccgtgtctgcttgacttccttccacaaccccagccagtctcccacactccctgaaggttcccccgtagcaaacccttggtacaggaatccccacctccggctcccgttctagggaagcccacacgaagacaggtcctgcaggcgggacccagccctgcccccatttcccacttgctcccttggtccacctccacccccacctcttccttctcctctgtcagccccaggtctaccctcattggagaacacctgcgagccctggttctctcggcaacagctttccctcttattgtcacagttccttttcagcgcgaagttctcctcggcgagaccttccccggccccctacccagactgcacttccctctgtcccattttcttcacagcatctctcttccccagaaaccatcttgtttacttgctgtctgtttcctccactagcctagaaactccctgaaggcggggctgatgtatcccaggcatcgcacctacagtgtctagggcccatgatgcttttaggggaagtgttttcatttcttttcaaagtagaagtgaaagaaaaaaagaaaagagaaaattgtaccctggataatatcggtctttgcagcaacaaagtcataaaatttaaacttttttttttttttttgagacagggctggagtgcagtggcgttaacacggctcactgcagccttggcctcccgggcccaagcgatcccaaccccaaccttctgagtagctgggactataggcaggcacaatcacatccagttaatttttaaatttttttgcagaggcgagttcttgctatgttgcccaggctcatctcaaattcctgggctccagcgatcctcccactttggcctccccaaaagttctcagattacaggcatgagccaccgtgttggcctattttttttttttttaatgcagaagggcaaaagtgcctaaggttcatggaagtcattatgaaacctgcctgagggtagggtagtgactttatcagtctcctttcctactgagtccccggtccccgcatagggcctgctgttctacaagcaagtgttagatgagtaacagggagaatcagccaaggtcaggcacttcggggccctgactccccagcttctgccaggtcaccccatgtgtctcccttctccatctttgagaccagaagtgcagagaaagggagccctctcggaatgaagttcgcacctttgggatgaacccttacttcctgcacttcccactataccccctcctgcctctttcctccagccattcacaaccattcccagttccctcgcttctcacttccgagactctgcatggagcatcctttccctgggctctgggctctgcttgggaaagctctgttatcttagccctccaccctggcccggctacccgcttcctttaggcctgcagtgcccccctagagcagccactagccattcaactgtacatttcaggccaacgtggtggctcatgcctgaaatctcaacattagggaggatcgcttgaccccaggaatttgagaccagcctgggcagcatagggagactctgtctctacaaaaataaaaattacaaaaattgctgggcacggtggctcatgcctgtaatcccagcacttcgggaggccaaggtgggcagatcacctgaggtcaggagttcgaaaccagcctggccaacatggtgaaattccacctctactaaaaatacaaaaattagctgggagtggcggcatgtacctgtcatcccagctatacaggaggctgaggcaggagaatcacttgaacccgggaggcggaggttgcagtgagccgagattgtgccactgcactccagcctgggtgatagagcaacactcggtctcaaaaaaaaaaaaaaaaaaaaaaaattaaccaggcatagtagcacatgcctgtcatcttagttacttgggaggctgaggtgggaggatcacctgagtgcaagagttcaaggcttcattgagctatgattgtgccactgcactccagcctggatgacagagtgagactgcgtcattaaagaaacagaccaaccaaaaagacaagtgtaaatttcaattaattaaaattaatttgtaaaattcaatttctctgttgcactggccacatttgaagtattcaacagttacctgtggctggtggctaccaaattggacagtatagatatggaacatttcatcatcacagagagctctattggttctagtccagagtttcctggggtctgtattacatgcctctcactacacttcccttcctgaattgggactgtctgtttctatgtttgtctcattgattcattcattccagaaatatttattgaggacttcctttatgccagggactgtgacagatactgcagatacgacaaattagacaaatgtcccagcccacaggaagggcaagcaggccataaacagcataaattcgtaaaatataacattggtcagatggaggtaagagggaggagagagggagaatgtaatttaaaatatgggctggtgccaggcgcggtggctcacacctttaatcccaacattttgggagttcaaggtgggtggatcatttgaggtcaggagtttgagaccagcctgaccaacatggtgaaaccccatctctactaaaaatacaaaaaaattagctaggcgtggtggtgcatgcctacggtcccagggaggctgaggcaggagaatcacttgaacctgaaggcagaggttgcagttagtcaagatcgtgccactgcactccagcctgggtgacagagcaagacttcatctaaaataaaatagaataaaataagggctggccaggcacagtggctcctgtctgtaatctcagcactctgggaggtgggaggattgcttgatgccaggagttcgagactagcctgggcaacatagcaagaccctgtctcacccccaattttttttttttaattagtggtgcatggtggcatgtgcctgttatcccagctacttgggaggctgaggtgggaggatcccttgagcccatgagtttgaggctgcagtgagctatgatcgtgccactgcactcctgcttgggtaacggaacaagaccttgtctcaaaataaataaaataaggaggtcaaggaaggcctcactgagaaggtattatttgagcaaactcctggaggaggtgaaggagggggcataatgatgtgtagaggaacagtgttccaggcaggtggaacagcaggtgcaaaggccctgaggtgaaggtgagccaggcaggctcaggaggaataggaaggaggccaggagctgaagggtaggagttgaggttagacaggtgatagaagggtgggagtgggtaggacctgcaagtttcaggtttctttcagatttcggctccaaggtctcctctctggagaggcttcctcctgttactctgtcataactcctttaactgatgacagtttggagtcatcatcattatttgcttgcttgtttactgtctgtctccctaggcatgcagcccaccccaatactctttctactctatttccttggtaagaaaatgccaatcttatttggcaccttttgagagactacacttcccagcttcctttgcagctaggtgtggccatatgactaaggaaggccaaccgggatgcccaagtgggagtgttgtgtgttacatctgggatgtcttggaggtaactcaagaggcagcaaggtgccctcttttgcccttctgcctttctgcccttccttgttcctgctacctggaatgctggtgcaatagctagagctccagcagcaattttggactatgaggccagtctgcagttggaaacatggctaagatggtggagcagaaattgagaaggattctgggtctttaagaccatggaggctgctaacctgcctgagacttcctatctcatactttttttttttttttttgagatgggagtctcactgtgtcacccaggctgaagtgcaatggcactatcttggctcactgcaacctccacctcctgggttcaagtgattctcttgcctcagcctcctgagtagctgagactataggttcccaccaccacacccagctaatttttgtatttttagtagagacaggggttcaccatgttgcccaggcttgtcttgaactcctgacctcaggtgacccacccaccttggcctcccaaagtgctgggattacaggtgtgagccactcatgcctggcccccatacttctttaacaagagagagataaaagcatttttcttggtcaagccaccattatttgctttttctccctcaggtgcagcagaacccaattctgctagtctcctctttcaaatgtaaattctctaaaggaagttactttgtttgactgattcactcttataccttgagagcccagcagcaggtccaggatatagtaggtgctcaataaatatttgtagaaggaagaactcattggaagcaatacaagacaccctgacaagatgtggcgagcaactccagggcaaaaccccagcctgttcctctgaacatccccatcaaacagcacagggccagctccaagcaggcttcaggaggtgtcgcctgaaggcatccctgctttgacggatttcctgccatgctgctcttctctaagcgcttctcagcctgctcaatccttctccactttgctgaatgtttttctgaccccctcccccacctccttcagccacagaccaatactctgcttggctttctgtcccgtcctgcagctgtgtggtatcagagagcagaaccttgcaaaagataaaggcagtagagaagtggcaagtggaaggagacactcttgtgtgagccattttacctgctatttttcgtatgtgtcctcactggatcctcacacctgtgagttagggtggattatacccatttggatgataatgaaagaggccgtggatcagagagaaaaggtccttatcctagaccagccagcgagtaaggaggagattcaagatgcatcggagaaaagaggtcagagtggctcaaaaaccctgagataaaatgggaggggtacgaagagccaggagaagggggtgtgaccagtcaggaagcacacggggactgctgaggggcagggctggagaggacagcaagaacagagtccaggcaggagaggacagctgggaggaggggaggaaggcaagggaaacacctgcatggggcacgggggcaggtggtgggggccagagggagaggcgagggtcaggtgacaggtgagggtgaaggtgatgaggcagggatccgagtgacagtggaggggttgatgtgacagtggaagggtcagagtgacagggaagggaccagggtgatgggggagaggtcaggatgacagggaagggtcagggggacagtggagaggtcaatgtgacagagaaggggtcaggtgacagagtaggagtcagagtgatggggaagggtgagggtgacagggtgggggtcagggtgagagaagaggtaaaagagagacagtggaggagtcaaagggaaaacggaggggtcagggtgatggggaaaggtcagggtgatggggaggggtcagggtgatggggaggggtcaagatgatggggaggggtcagggtgtggggaggggtcaggatgatggggaggggtcagggtgtggggaggggtcagggtgatggggaggggtcagggtgtggggaggggtcagggtgtggggaggggtcaagatgatggggaggggtcagggtgatggggaggggtcagggtgtggggaggggtcagggtgtggggaggggtcagggtgatggggaggggtcagggtgatggggaggggtcagggtgatggggaggggtcaagatgatggggaggggtcagggtgatggggaggggtcagggtgtggggaggggtcagggtgatggggaggggtcagggttacaagcattacaggtaaggggtgagggtgatgggggggtgtcagtgtgacggggaggggtcagggttacaggcaaggggtcagggtgacgggagagggcttagagtggcagggaactggttagagtgagggggaggggtgtccccgacagaggagggtgcagagtgacagacgcctcgtcagatttgcaagctgacaaaagacacttcagcaccatgtggaagaagaagggacaaaaatgggttagcttgacataagaagggtcagggtgacaggagagatgtcagactgacggaggaaccataacaatctgatggggcatcgcactgactccccagggagcacctgaactccaccaaccaacgggagcattcgctcccgcgcagaagggacagccaatcagagtgcgcagccttgcatgacgtcactggctgccgggcagactccccttcagtccgccgcccaaaggcccagttctccgtcacctcgtggtctggcgcctcagtggcagcgcatgtcctgccgctgaccagtggctggggaactcctgctaaggaggcagccctgagaggggataggggagagaatggacggggagacaactgaagagacagagatggggggacagagatagacagagacagagagagggagacaaggagacacagagacagacgtagagagacagaaaaagagagacagagatagagagacagagacagacagacaaaggcaaagatggggagagagacagagatggagagacagagacagagacaaaggcagagatagggagacagagatagagagacagagagacaaaggcagagatggggagatagagatggagagacagagagacaatggcagagatgaggagacagagatagagagacaaggagagagctagggagacaaggagacacagagacagagatggagagacagagacaaagagacaaagacagatgggggagagagggaggtggggaaacagggagggatgggaagagaaagatagggagagtgagagaggcgaagagcgacagacagagatggggcctagaagggggagagacaaggactgagagatgagaggggaaatgagagggcgatgggaagcatgggaagcaggaagagcccagagaggaaggagggagggcagctctgactcagagagggcctgcgcagccccaggagggaaccccagaagtggggagtgcaactgagagggagcaatgacgtctcagactgagagatgagggggcacgagggagccctcgggcatcagtggcgggtgacaaagacagtaccagagaaagccaaagccataccgaggggcggatggacagcagagccctaggaggagacagcccaagaggtgccctgacctagggtggatctgctgggctccgcgcccctgctgtccctacctcctctaggttatatgcaaaagtgcatctttggagagggttgaaatctcccagtttccaagtccttagatagtggcatctttttttttttttccccgagacagaatcgcaccctgtcacccaggctggagtgcagtggcgcgatcttggctcactgcaacctctgcctcccaggttcaagcgattctcctgtcccatgctcccgagtagctggaataacaggcgtgcgccaccacacccagcaaatttttgtagttttagtagcgacggggtttcaccttgttggccaggctggtctcaaactcctgacctcaggtgatccacccgccttggcctcccaaagtgctgggattacaggcgtgagccaccacgcctggctgatagtggcgtcttatacaatgctttgctcttgttcacttttgtgcagacctgatccaagaagcctcggggggtactgcaccccccaccccactgcatctagaccagagggaagatgcagggtgaagaggggagaggagcctaaatgaatgggaaatcgagacaccgagaacaagaccagacgtcgagagaggccaccaagatgcagaaacctcatgaaggggcatctgtattgactcagagagcgggaaagataaagatggcaggtgggaaggagcagagaaggcggcagagagagcctccgacatgagagggggacctggagaaggcccagggacagatccaagaggtgagagaagaaaaggcgagggggatgtacagggcaaatgactatgggtcctctggacacagagggaaaggaggtctcccagaactcaggtgagtgcttgtgagtttcatttctaggaggcaggggcaggtgggcagctggttttattactggctggtgtctgggctcctctgggggtggaggtctttggagctcagagggtgagttccctgagggttaggctcttgactgtcctgtaactgggttcgtgcagggtagacctagaactgtggctgcctggcactttacaggagctctgcgcatttgttgaattaatgaaaacaggacttgctctaattagtttatcagagatttacactcagtctgatacgctattgtggggtctctggtgttgcggggtctctggaggcatacacagagatcactggtgagccatggtggactttctagtttattttatttcagtgaattaatttatgtatttattgagacaggtctcattctgttgcccaggctggagctcagtggcgcaagcatggctcactgcagctttgacctcccttgctcgagtgatcctcccacctcggcacacaccatgactggctaatttttaaatattttgtagagacagggtctcactatgttgcccaggctggtctcgaactcctggcctcaagtgatcctcctgccttggcctcccaaagtgttgggattacaggtgtgaaccactgtacctggcctattttcttttccttttttctattttttttttagacggagtctcgctctactgccaggctggagtgcagtggcatgatctcggctcactgtaacctccatctcctgggttcaagtgattctcttgcctcagcctcccaagtagctgggaccacaggtgcacaccaccacgcccagctaatttttgtatttttagtagagacggggtttcactatgtttgccaggatggtcttgatctgttgcccttgtgatctgcctgccttggcctcccaaagtgctgggattataggtgtgtgccactgcgcccggcccagcctggcctgttttctatcctgaggggtttaccttctgttgggagtttgctgtgttacagttaacctcatggaaccctcataagaactgggcaagtttcactttagccccattttaaagaacagaaaactgagatgcagagaaattaagtaacatggtccaaggtggcaaattaagttagaggaagtcaggatttgcatccccatttgtctgttaatatagagtttctgggggatcaggaacaaacagaaacacctggggtatggttagagacccagagagggaaattcagagggaggagagtgtaaaatacagactggggggaggcatgaagaaatgggattagtgggagtacattccagacttccaataaatactgaataatttagtgagtgaatatggatggtagcatcctgaatctaagtccacttaggataatcctggggctgaaaatctttttaatctttttcgtttgtttgttttttagagacagggtggtctctctctgttgcccaggtgggagtgcagtggcacaatcgtggcttactgcagcctcaacctcggaggctcaggtgatcctccctcttcagcccccagagtagctaggactacaggtgcatgccaccacatctgcccaactaattttttgtatttttagtagagatgggatttttgccatgttgcccactctggtctcgaactactaagctccagggatcagccagcctcagccttccaaagtgctgggattataggtgtgagcccctgcgcccggccctgaaaatcttttaaccttagaatgatacagggcagtggttctcaatgagaggtagttttgccccccagaggacgttgggcagtatttgctgctggcatccggatggtagaggccaggggtgctgctgaaatcctacaatgcacaggacaggcttccacaacaaagaattacgcagctccaaatacaggcaattgtggctatatgcagtagttgtgttatatggggttgccacacatttccctcaaccaatcaatacataaccttgttttatgcatgtttctgttgaaggatgccttatttaatatacattgttgattcattcacatccaactcctggccaccagtgctctaactcatgcctgaatgaagcttctctaacatacgtattttctccataaggcacatcacggccttctcgcacttaggaacgctagacagctcttcagcaccatgcttgggggaccttttaaacgctgatatcaccactaaaaggcccaaagatgcaaagcacgtggcactaaacagaccgagaaaagacactcgttcacagtataagagccgaaatgagaaggcaccctcgttcagcctcgtctgggaacccacacatagggctactcaagattttctctgctttgcgcctgtccaagaataaccacaaaagcccttcgcgtattgattctgggcttctaataaatttcagcgagtaggcaaattcgcagacacagaatctgggaatcatgagggccaactgtgtcaacagcgcagatgttagaaactatgacggacaggaagaggtcttggactttggttctgtcttgatgagagacacacttgatgaaaggtctcaggcaagtgaatgcaaatctctaagactgtttcatcttctgtaaaatgggaatgtgcatgctctgtctttctttctgtttctgtaccgccctttccttcttaaagctggttgtgaagaagtttgttgaggaattatgagaagtttgctgcagggcagttgaggatagaagaagatcacaggaggaggaaacagggtcaaaaaaggtaagagcccaggggaggtagatttggactccatataaggaagaaggtttttttttttttgagacagagtttcgcttttgtcgcccaggctggagtgcaatggtgcgatctcggcttactgcaacccccgcctcgcgggttcaagcgattctctcgcctcagcctcctgagtagctgggattacaggcacatgccaccacatccggccaatttttgtatttttagtagagatggggtttctccacgttggtcaggctggtctcgaactcctgacctcaggtgatcagcccacttcagcctcccaaagtgctaggattacaggcgtgagccaccaagcccagcctcctactcttgatttttataaaagtacgagcccctccagagcatgagggattgtggatagacttcaggggcctgtgcacttgtacaggaaaaaaaatcctatgtcttcattttcatcatcctccaacaaaaactcaacctttcctcaattaaatatgtaagcagcaaaccatgctagtttcagcaagacccatgcctgtatccccagtaggaatcacagatatctccatatcccatcacagtggtgcagatttcccaaaatagtgtttatgcgcctcgtgattttgaaattagagttgttaaaatccaccgccaatgtctaacatgttgacaaaaaaagatgatattatgatatcacaaattttgcttttgaaaaatattttgagaaactacattttagtgtaactggcctcttttgttatttcatgttatgcatttataagcattattctgagaaggaccacggcagcctgccaaagagatccatgaccccctaaaagccaaaggacccagttttagagtaaatggacccctgaccactacgtggtggatgcggccagaggatggggactgggcagagaagaaggaagcgggaagggaggagcaaggcagagcgtggcctctggaggagacagttggagggtaaggggtggcactggcaagcctagtgggggatgtgttggagggaaggcacacagcccagtggagtaggggcaacatccaggaagggagcagcaggcccctaccaggatagccagggctgtggcaggaccatgggttcagagggctgcctgcctgggttaaaatcccccctccttccttgagcctcagtttccccctctgtaaatgggctaacaacctcgtgtacctcccaggatgaatctaaggaatgaatgagataatccatataaaatttgatgtctggctggtggctcacgcctgtaatcccggcactttggagggctgaggcgggcagatcacttgaggccaggagtttgagaccagcctggccatgatggcaaaaccctgtctctattaaaaatacaaaaattagccaggcatggtggcacacacctgtaatcccagctactcaggaggctgaggcaggagaatcgcttgaacccggggggcagaggttgcagtgagccaagcttgccccactgcactccagcctgggcgacagagtgagactcagtctcaaaataaataaataaataaataaaaattgaaaaataaaataaaatgcagtgtcccccaaattatcaacaccccctacaggttggcctctggttgtggggagaggcagacagagtggcaacagacatgaccattcatattttaataagtactacgtgttgggtatctattattatgccggggaatctccatccatgacatcattttgccttccttgagacccttaagatgggacgcagagggacacaaagaggcggggcaagagctcaagtataatagcaggggtggaaagtggagagagaaaaggacagagatgggatttgagggaaaggggataaggaggaaaggaggtctccaaagttgggagaaaggaggaaaccctaggatgtgtgtcgcccctccaggaccagcctaaagcacagaggcgtcaggagggttttggaaagagaaaggctccaggttggtgtgtgaaccgcctcccccctggcagttcctccccacaccaggccgcctacctcagtggcaaagaaacctttgggtcggtgtttgcccagggacgcgaggccaccgggaccagggctttcgcttgcactgatggtctgttgagctgcggccaggatttcgtccagtttgtctaggggtagatgaatgaacagaggtgggaagacaatgaaatgaagtttgctttgacccgggccgcaaagaccagagctgccgcccgcagttcatccagcacctggatcaaccaggaaagggcagccctgcctgggtccgggtggacgggcagtcccgcttggagacacaatctcccagcccagtgggcagcacccagggtgggaaggggtgcgggcagggaacggggcagccgtcgggagagggcgggcggagggaggggaggtgggatcgcagcctctctggggcaggaaggtgaggggcgccgtggggttcatggtgggacagggatgcagcgggtgccggggctggggcccggcatcccgaggagcagggctgggccgtcttactgagagccatctgatacacggtccgctttttctccatgctgggcaccggcgccggctgctgctcgtactctgtgggcaaagaacacggatgacgcccagggagcccccgggggcggggcggagcgggctcggcctgtgggcgtggccagcaggtgcgggccagtgggcgtggcgggcgcgagaggggcagtgaggggccggggtcagggaggggcgagtccgccggcggggtcgggagacgggggccctcccgccagtcctgtgcccactcaccactcttcttcttccagggggagactagcccgggggagaggcagtagaggagccaagagttaggacgtcaggggaaggtgaggggccccctgtctggaagcccgcctccctcggggccccggggtgggggcggtcagctgtccgaccagccccctgtcaggggaaatgggacccccaggtccactcggccttgtctggagggaggggctcgctttcctctgttattgggggttggggggagctggtggagggagagatgttgaatggggctggggggtgaggtgggacaaaaggaaggagacagagagacccgcagagagggtacatacagaccctgagagagaccccaacggagaaacagatacaagagcacagaggaaagtcgtctctcagacaccccttcccagagacacacacacacaggccagagtccgacccatggactggggacaggatgaggacaaggacccctggtcactaacaacactaacgaactcaagggatggtccagccctccttcccctctccccccggccccctggcctcagcagccccgcaggctcacccatctcctccagctctgaggtcatagatttggaacgcagggagatggttgggggcggcagccgcttggcctgctggggtgctgaaaaggtgatgaggggaggcatcagtatcatgggggagatgcccccaccaccctctaccaccacagggctcccagggctcagagaatagccattgccagcgtgcggagccctccctgcctcagtttctccccacaagggtcacggagaagcagtgctagggaagggaaggccttgggcagcagcaaccagccctggggctcccgcagggctgagcctggtggcagtggggtggctgcgagagtggccgcaggagcacctttcttgtgcactgcctcatccatgtccgggtgcctggtgaccatcaccaccttcaccatcagcgtgttgcccccttggcggatcatgttcaccacctgtcggtggccgaccttcaccacattctgcccgttcacctgtggcacagacacccccagatcacacagagtagacgaggggaggggtgcttgcagcttcagagaccccaaggaggatgcctcctgcgctgccctgtccatggccctctgggctatgttcctctccctccgacccttcataccaccgcctccctgggcaagccccctttcccaccctccctggccccagggttgggggagaggctcagcctaccctattcacttccccctccctccttgtccccagtatttatttatttatttacttttatttttaaaagacagggtctctctctgtcacccaggttggggtgcagtggcccaatcatggctcactgcaccctcgacttcctgggctcaagcaattctcccacctcagcctccagaatagctgggacctcaggcacacagcaccggctaattttttttttaagagacaggatcttgctatgttgcccaggctggtctcaaactcttgagttcaagcaatccacctgcttcagcctcccaaagcactgggatcacaggcgtgagccgctgtgcctggccatcccccggtattgtgtatgtgttggggacagctctgtgtcactcttttgagatgcctcagaggcctttagatggaatcgctggggaaagcagaggctggctggggggtgggcagggggctgggaatcctggtgccaaaggagaataaaactgggcagccagatcctggtgtgaatcatgagggggtctgggaacttgtcacagggtcccagggaagagagggggcctggactgacctcgatgaggaagtctcccattcgcagtccagctcgccatgccacgccaccctcgtccaccgactccaggtactgcagcgccgggaaggccggggtgggggtgaactcctcgatgggggtctgcgctgcagacagggaggagccggcggggtcggaggggagggggtggagaggccgagcaggggatggggctcagacccaagtcacggaggcctcaccgcagctgagggaccagcaccccggggtggggtggtgggcgggctggggtcccttcccctttccagcccccattttcagccctgcttctggggtcacagagcccttctcccatcccctccccggctggcactcacccttggccccccggagcacgaacccaaacccctcactgtccttcttctgcagcaagactgtcttctccttaatgatgtaatcgctggcagggaggcaggagaaatgggggggtggtggggggagtggagaagacatcatgagacacagaggctgtcccccacccggcaacccagacccaaacctctgctccagggccattaattgcatctcctaggatctctgtcacccactctgtgtgtgtatgctagccctgatgggcttccccctcagagccggcatgctctctctctcactccctctctcctcattcatccatccatgcatccatccacccatccattcagcaccaggcacggtggggaggatggggagaagagcttccagattaccagacagccaggcttgggtccctgctagtcacttcctgcctatgaccttgagcccacaactttaaccttttgtgcctcagttccctcatctataatggggggctatcacagatcctacctgatggggttgcagtgggaatccagtgggggtaatacacatttagtatttcgcacagtgcctggcacatagtaggtgctcaatatgatctgctcgatgtccttaggtcagagtgttaagtcaagaggactcatgtactttgatgatacccctcaaaattcctttatacatatgtcacctcccaggaaccccacacagggtaaaattgctaattctgcactgcccaatatggtggccactaggtgcacgtggctgtttttatgaaagctaatcaaaatcaaatggaaaaattcaattcctcagtcacagtggccatatttccaagtgtgcagaagctgcacatggctggtggccaccacattggacagtacagatatagaacatttccattgctgcaaagctccccgtggacagcactgtcttctgtattccctggtgcatctcaaatggagctactgcatgcagtcagcatattctattatagtaaaatgcaaagcacccatgaatatgggtggtagtttccagtaaagccatcaaatgccaccagcacatttaggtaaggctcacgtacccaggaaatgtcaatgaaactcagatacagttcatggatctcaaggctcactcaaacagccccaaactcctgacatgaccactgtacacctcaggaatatacatccattccattcccagaggatccgacaccccagtctacatcaggaatactcagacaccctggctgcaaccccactgccttcagaatacccaagaacacccaggagtcactggaacgcgtgctctgctgtgctgagcttccttcagcactgtctaaagcctgtcccagggcacacttgtagcacctcccaccctcacaatcccagtgtattccaataatacccagatcccagtaacatccatgtggccctaatacactccaatcatagccaagcatgctccccaattacctgcccccacaaattcagcaaaacagccgtcctcgaatactccagtatgtttcggcaacccccacacatcccagtatgttccaataataactccccctcactcggatctcagtgtattcccataacacgccctctgaacacatacatcccagcaaatgccaataatacttactgtgctccactgtatttaggtaccacccccacaagcacccctgtatgctcccaggacccccatggctccccttgtaaaaatccatacatttgcaccatggcgacagggttctggatgtgcacgtgtcctcccttcctgctgccaccctccttgtggcacctcagtgcacctaacaccacgcatgttcacatgtacatactccagcaacagtcctcgctcaaagttcgtaacagtccagtaaactcatccacaccatacccgccatgtcttcctcccctggatagagaggtgttggcagagaaggagggaaggggctgaaaggggtgaatgagggtaggaaaagggagaggggaagggaggaaaggggccgagaaggccagaacagcaagtggacggggaaactggacacagaaattggctcagaggtcagagctgcctgtttctaaccatgcattctgtaatgtccccattcccaccttcttactcctcctcctgtatctcttccaggtctccaaggccccccagcagccagcagcacccttcctcactggaggcaacctcactttctttcactcatgccacaaacccctcccttcctccatctttctccctcccctctggaatctctcttgccccctcatcagcctcataccccatacataagccttccccaaatgtcagccaatatagtcaataaaactcccatatcaatatgccaagaaggagcacttgccattggctgggcagtatctgaagcccttcacagatagatcattaaattgtcttctcataaccagcctctggggcagggataagtaccagttctactttatctatgtatttattcatattttttgagacagaatctcactctcttgcccaggctggagtgcagtggcacaattatagctcactgcagcctcaaactcctgagctcaaaggatcttccaacttcagcttcccaagtacctaggactacaggtgcttgccaccatggccaactaattaaaaaaatctttttttttggtagagatgggggtctcactatctttcccacgctggtcttgaactcctagacttaagcaggcctcccacctcagcctcccaaagtgttgggattacaggcatgagttgccacacccagccctagtttcactttataggtgaggaaacagaggcacagaaaggttaagtaacttgtccaaggtcacacagtgagtatcattcttcaacaatacccaagagaatactcgggtaactgcagtggtaataccctccactccacagcaccgaaataccttgagcacatatatccatctgctcggaatccaccctgagctcggccctgcagcacctggagtttatcccagggtgtggcagtaacaccatgacaatgaggaacacttatcgaattattactgaatgccagccatgattccaagcactttgcatttatatatttccatttatgtattcagttagtcctcacaacaacccagggaagggttgactgttattcttcccattttataaatggggaaaccgaggcacagagaaataacttgctcaagatgacaccagctagaaaaatgtcaaagccaagatttgaattcaccagatatatatatatatatacacacacacaccagtggtgatctgaggcagggaggggggtccaaccacatccagacccaccctgttcctgcttctgcttctcaaccaccccctatcctacacatgctccattcccctctctgctccatgactccctcacccaatccccagctaggacatacgtggtgttgccctcatcccaccacagtctccttgaacttcccaactgctctcttgctcccacagctccatgtacctctaaactccctctccccaactcctgtgtacccctcctctctgcacctcactccctactcctccatgccatgttgaggttccacatcgccctaacccacccccctcatccctgactcccacaagccctcctcacaccctatggagccatccccccatttcccgtgtcccctgacacaccctacccccctttccccctaaacatcctcctcagacctctgtgacctcctcacccttgtcctgcgacctctccctcatcctttggcctcacccttcccacaccctcctgcacctccgtaagtaatctcactggctcccctaaagtacctctggtccctttcatacttcctgggtaccctcttttgcatccgtggaaacctccacctatttctgccccctcgactcacttcaccacatgccctcccgcctgcatttactggcagctgcgtttcatttacattccctgtgtcctcttggtattctccccctactgcccaaatccccacccccaaatacccccccacattccctgaattccctccccaccccatttctctgctccgaaccctcggtgctccagccgccacccctcccccacttcagtgtccccactctcccctgttccattctcaaccctgcacctcctacccagacccctctagtccctcccccttgccccccatcttggctgcccctgcagcaccccattcaggctccctctggctgactacctgccctgcaggagcccacacaatgcttttccccaggccatccctaagcgaccctgagcggcctccagagctcagcagccagctcttgttcactggatcccacacacaggggcactgcagcggcctgcactcccctccccaccccaacgtccctctcacacacccagggtccgccagcccagagcctgctgctgtgcacgggcgcacccccaaccccgcactcagccccttcccacgtacccgtgtccatggcctgcccagaggccaccacagagggacgccagcccccctccccatgctgagaagtggcacacacaagcggatgcggctccccatgcagctcagccggggctcagcacacgtgccccacatgggcagagggcagagccagtgactcaagtactcctgacatgcacagacccccgggggcaagggggcaggggagaggagcacatggggacagagacacaggatggacccttgaagtaggggcctgtgggggaggggtaggccaggcccaggagggtgggtgttgggaagcacagccgcagtccctgggacagacccactccagcacacaccacacacacacacacacacacacacacacacacacacacacacagtcccagacagcctcgctgtcgctccaagtcatacagagacagacgctgtcacacagggacacacagatggacacagttggggggtgggctgggagcccaccatctctccatttctctctctcacacacacacgcacacacacgcacgcggctgcaggcagtcacacacacgcacatcgacacagccacactgacacacgcaccgtcgcacagtgacacgcagcggaaaaagaggaggggaggggaagccgggggcgggatgcgtgtgtgatggaggggggatgactgtgaatgggagagaggggtatgaatggggggacttgccaacaccgtgaagaggtgtggggatgtggggatcagagggacaggggcctgggatgtaggcggatgcgggtaagccacggtggctccccacagggagggctccggggaatgggggcgctaagggcggcagaaaggcgagtgggctccaaatcctggaggggggtcggtttagggggcctgctgggaggaaggtcttgggggaagagcagaggggggcctggaagggcctgtgagggggtggaggaaaagattcccagggctgacgagtgcgtattaggggggagggtcggggagaggattccagggaggaagatggagaggagaagggttgagaccaggggcccgaaagggatttcgggctgagagaaggttagggaagaggagcggaggggaaggggcgggttgggggaaggggaaaggccctggggctggggtttagcggcgggggagggtcgccaccgcgggccggggcctgccggccggcccgcaaagcaggaggcggcgcgctccgttacctgtagatgtaccagacgctgcgccgccggggccccagggctggccagctggaggacagcgcggggggcggctgcggcagggagctcccaccggggccgcccccgagacccccgccgccgaccgcagacaaagccatcgccgccgcggccccagccccggcccgggtcccggtgccggccgcccccgccgccgccgccgccgccgcgtccccgtacccgctcggccgaacccccgtgtccgggcccccaggccccgcctcatgctgacccgcgccgggaggggggagggggagggggcgcgcaccccctcccgcgggagggagggcagggccgggggctcacatgccggggggcgcgggggcgcggggcgcggggtcgggccgcggcggtagcgcgaggaccgcggacggcgccggcttcagcaccgcggacagctccggaggcgggcggcgggcgcgaggcttaaccccttggcgtcctgcgccgggcggcggagggggccgggcaggggggagggggccgggaggggaacgcgggggcccccttggcgggagaagggggaggggcgaggcttggaggggggaggagaaggggaggcacttccggtctgggcccccccttaatccccctcccccctccagagccctcccgcgcaggtgcagagctagagagcgcggggagagggaggcacaacatcacacaagatgcctcgcagccgcgtgcacggacgcgcggacggagccccgcttccccggcagggacaccgcgggtgagagaggccccaggcggggacacgcagcccaccaccacagaccaacacgcaacgcacctcgacacagtcggcaagaaaggccaggacattcagactgggccccaaggccatgagcaacacccctcccccaccagagaagcccaggcggaggggcgaacacaccaccacagctccccgagagagcgtggaccccgagccagcgcggggagggggcggcacacgccaggaggggagacacacggaaggaccgcccagctccggcagggaggctggggttgggccctggctgccgggcgcacggcacagcacaggccaggccagcgcagacagggtccgggaagagcggggaggcaggaggaggggaagctgagacgcaccacacacacagcagcacgtgggagccagcgagaggcacggaggagtaggggaggaagcccattgacaagacagagtagaaggaggaagctgagggtgacggggaccacccgcattcagctggtaggacaagtgacccccacagacggaggccaaggagagacccagagagacactggtagacaagaagcagaggccgacatagaagctcggggtgtgggggggtgtaccccaatactcacccggtgcccagagcaggagacgcgccaggcaaacacgcacaacggtcaagcgcctcagacactcggggcgcagggtggcaccccagccccaccctctctccccatgttgccatttctctgtcccccccatccccgacccatccccactggccagaacacagacacgtaggtttggacacatttaatggaaggatgctacgcacaaggggactcttccctggattggggggagcagtggaggagagtgtcatattttagacaccaaattatgaccctccctcccccacagccctgtccttctggaggcccaagccctggaatcctcccctcctctgcccttccctcccccaacatcccaggtcctgaatctcagatcaatcagacagacgcacatgcatgcacacacgttaatgtgcgagtacacacgcacagtgacatgcacagagagggacggatgtgtgcagagacccacctgtccatgtgtgtgagcagactcactgacatgccctgtggtgcttgcccacggattcagagaagcacagatgtgcagagccagccccacagtcatcatagccacaaaggcaccagtatatacagagcagggcagaccctccagccccgggcataggtacaggtacatccaggccacacatgcacacagatgcgtgtcatgcacacctacagagacacacgttcacacaccaagaaacctcagctctggtcgtgcacacacgttcacacgccccccaggcaccccgtccttcccctcctgaccccatcccctccctgcccctcgcctctcacctccctgggccaatcccatccattaagcttccgaagcaagtcagccagcagccagggaggggaaaggtgtcagtgcacccatctcctcaccccaatcccacccagccctgactgcaccctccccacaccggtgcatgggacacacacattcccactgcacatgactgcacagagatggggcacatgaaggagacaagggcctccagccagccagacataagagcgccccggcccccccaggcatccccaccctgccctgaccaccccgttgtctctggctaccccagagctgggcagtcttagtggctgccgaagatggtttggggttgggctgtactgtctgaagctaattctggcttatcccacccctggatcaaacttgagaaggaacagattagaaagggggcttagaggtgatggaaatatttaaaggtgtacattgtgaagggaacttggggtgaggggggttgcccgagggtgtaaggacatttaccttggggcatcaaagctgtcgtaggagcccacggtataatgccggaagagtctctttgccttgtcactgcggctttctgcagggtgacaacagacaaccttggactcttgttttggaaaccacaatcccagccctagagctcctggcccaagtcttcccatctacctcccagtaccccacccccattaggaagggaaaggagtggacgtgggaatcctagggtccattgaacactgctgggggttccgcattaccttgcttgctctcctgagagcgattcgccacttcttccaggcagtcagaggggaaccagccaacacgacctttgacctggccttcccagaagcctccttccccgatgctaagtactggatggggaacggggacatagagacatttctgtgtttctgtgctgcccctcaactgccaacacactcaacttagagcattcccacagttaccagctcctggcccaaggccatccttaataaacatctgaggaaggggcgaggagcttgggggagacccatatcatatcactcttgcattctagtttctggatccaataaggatgacaggcattggggaagacgactgttccataacatggtcttcctaggttagaggcaggtccacaattggtccttgtctcccctggtaactggtcacagctcagttgtgtaattccccttcaccctcctaggctctgtggacttagatcacggatggggcgacaagttctacctcaccctcccatcactgtccctgccacctcccaaagtctccttgccacttaatctttagtcctttgtccccagacccctgtctctgtctctctcggcctctcctggctctagaagggaaaagagattagcatcacctctttccttctctccctctcccctaatggaagcggcttccccctgcccaccctcccaggccccaccgcttccccatttagcaaacatcacagactgcctgttacatgcctgctgctgaaaaacagagatatatgacaagaacagctaatgcgtatccaactctcacctgggccagaaccctaagaggggccactttcattatcccccttttactgataggaacactgaggcttggagagccaagatcatttgctgaaggttacaaggctagtaactgacagatctggatttgaacacagctcagtctgcttccagagggcatactttcagtcactcatgtgcgctacctctccatgcaacggcttcagtgcatgacaagggcaccagtggcaaacacatggtcttccatttctccggcatttttcatgactctgcccccattcagcccttcacatagtttccttcctcgttcaacccttgtgcctacccaggtaggtaacaactgtttttccattttatagacaaagaagctgaagcgaatgtggagaaaacccttgcctggagatggctccagctatgctaggggttgagttggggccatcagatgtattcccctccacaaactgcctcccttgagagcatctggggagaccaaatgaggggaagctgaaagtcatggaagagagcaggagatgggttgtcaaggggactgggttcttggctggtactgccatgcctggcttggtggtcttgtaatcaatcatttgttcactgtaaaaatatttagttagtgccagtcatgagtcaggtaccagggtagacactgttgaatataatcaatgttgttccttcctttgaggagcttccagagcagtggccaatagaggcataactatacaagtgactgtatgattggaagttggggtcagagctcaagggaaaataagagggtgtttggagagaagccagatgggagtatataacttataatggcaaaggggtccagggaggtgtccctgaggtgtgacacataggttgagacctgaaggatcctaggagctggggaggcaaagagagcatggaagagttccaggcagaaggaccagcatgtttgaagagtttggtgtacaagaaagcttgggacattggaggaatggaggggttggtatatcggaggactggagaattggagggctcagggcattgggggattggaaggcttggggcattggaggaatggaggggttggtagcactggggaactggaaggcttgggcactgggaggattggatggcttgggccattgggggaatggagggcttggggctttgggagattggagggattggggcattagaggattagagggtttggggcattggaggattggagggctcggggcattggaggattggagggctcggggcattggaggattggagggctcggggcattggaggattggagggctcggggcattggaggattggagggctcggggcattggaggattggagggatcggggcattggagggttggaaggctcggggcattggaggattggagggctcggggcattggagggttggaaggctcagggcattggaggattggagggatcggggcattgggggattggagggctcggggcattggagggttggaaggctcgggttggaaggctcgggcactggaagattggagggcttggggcattgggagattggaggactcggggcattggaggattagagggtttggggcattggagaattggagggctcggggcattgggagagtggaggactcggggcattggaggattggagggctcggggcattggaggattgaagggctcggggcattggaggattggagggctcggggcataggaggattggagagctcagggcattgggagattggaggacttggggcattggagaattggagggcttggggcattggaggactggagagtaggatgaggtccctggaaccttgtgggtgaaaggaagagtcgcatgagatgaggttgacaaggtgggcagagaggcagcttggaggccaggtgaagactctgggctgtgattctgagagtagcaggagtcagctccctcatcaggctgtgtgaagctcagtgacatcgtggatgtgggtgtgctttgaggcaattaagtccctcttaatggaagacgaggatataaaaacagaaggcagtgtgttctctccctgcgtagaagcattgagcttgtagctcagcaagatactgcccatggtcctctgcctgcccggaaggtcctttacctctggcctcagctcacctttcttttctcccatctcccccaaccccacgtgcctacatcccaggcagctggccctgaaggagctgcacctggcccccacagtagctcctgaatttgatcattcattcactcaacatatgtgcattaaagcctcctgtgtgctgggtcattaaactgagccctagagacccagagaccagtgacttatgacctcacctacaggaactcaggctatgggaagagagactaggaaacacatgcagttacacagcccacctgatgttctgacccccgaatacccttcaaggcctcactcaagttgaccttctatggtaggatcctccctgcttattcaggggcccaggtctctctcctctaagtgcctgaagtaggggccacttaggaaaatgatggctttttttttttttttttttgagatggagtttcactcttgtcagccaggtgtgatcttggctcactgcaacctccgcctcccgggttcaagcaattttcctgcctcggcctctcaagtagctgggattacaagtgcgtgccaccacacctggctaattttttttttttttttgtatttttagtagagatggggattcaccatgttggccaggctggtctcaaactcctgatctcaggtgatccaccctcctcggcctccgaaagtgctgggattacaggtgtgagccaccttgtccggccaaatgatggctcttatatggcacttgttatgtaggaaacattggtctaagtactttacatgatctgactcctccaatcctcatcaaagtcccattttacagatgaagaaactgaggcccagagaaatcacttggctgaggtcaccctgctaggaagtggtggggtctggatttgaacccaggctgccaggctctcaacctctataccgctcagctcctgggcagcctagagtctggcaaagaattgttccaatgcctcgtattaacggccacacctgcggcacgtggtggtctctaaagcatccttctatccaagaacacgtcagcagccctgcaaagcctataagcaggggagactggctccactttccagatgaaggtggaaaaaccaaagggaggtgaaccctgataacagcaccaccattttgggaaccctcgccacggccaaacatcttatatctgccagctcgtcggggccctagaagtaggtccctgcctgtctctcagttgaggacccctggacagatgcaggaggcaaagttaaggctgctcggcctcacgctctgcaccaggtggcaggaaggactgtgggcttggactgaggaccttgggcaagtggcttcacctgtgtgaggttctgttccttcaaccatgcaatggggcccatgacctccctccccagaaagggccatcaggagtctaatgagacgatttggtgagaagttccagccatgccctgcacacggcatcagtgtcccgcagtgggacacggctcacttcactgcctcctgacagggtcatctgagctacactctatggtcctccaagcctcaaggggtgtcctggggctctctgaggtctccagagtgcatgagatactccaggtgcccgagaatggtctgctctctgctccacattttccctgatcgcccccacagcccagcccagcccaggccctgcttccaccctgggtacctttgatcttctcgcccttgctcagggagatctccccctcggcttgggcctggtaggacttcacagccatgaaggagcgtccgggtaccgctgagtagagcttcctccgcctcccgcggctgcccagggagcccccggggccccctgagccccccgtgcccccggctggcccttcccggggtgtcccgctggagctgcgtacacagagggcatgagaggaggggagggtggagggaggggacacctctgggaggacaggggtccttgggtgggggaagaggacggtgcatcaggggggagggggggtttcccagcactggcgtcctccaaggaagagggcatttgggggctccctctgcctgcccgcagctgccccaaccagccccctctcctgcctcctggcttccggctctgccccctcccacggtcctgcgcgcaccgcctgattcagcttcctgaggctgagctgggactgtgtcatccctccgctcacgagccttccgcgactcccagcttcctcctgggtcaggtccaactcctctgcccgccgttgccagcctctcccccacttcctcgggacacgcctggctggccttcgcctccttctcaccctcctctagccaggtgggcttcctgaccccggaatgtcccccgccccttcctcatcctccctccagagtgacctctctgtccccctcaagtccctgccaccccccccatcctcttcctgttcagcttccctccacctcaccctgtcattctgtctgtccccaggggctggggcccatgtttctttggggtaccctctgcctggggcccctgtcctggagcagacatccagctaacatgtggtgcaccgggggtggagtcgggacagtagctcccaaggccttgctttaccccaaggtgacactagggacttggatgagggcctacagaggaaggcagctgggctggcctcgggggaagccgccgatctggagaggggatttgacggggctggggactgtggagccagggctgcctcccctacctgggccggcctcggggctgcctcttggcgtcctcagggtgcctccctcgggatggagagcgggccctggcaccccgggggctgctggcacttcggagggtcccgctgctgagcttggtggtgggggccgagggctgcgactggccctgggaccctgaggtagggccaggggccccagaggacgcggcccccggggcggagaacaccatccagtcgggcagcgccatgctggtgtcactgttggcccgcagcagcgccgggggcaccgtcagccctgtgcctgggggcccccgtcgccgggccgcgtacttgggggactcctggaagggcactgagagggcacagtggcggcggggggcagatgttaggggagaaaaggcaagcagggggccatgcgggggcaagagatggtgggagagaggcatgagggagaaagacagagatgagaaagggaggggggcctggaattgctcccccaccaccatccagacatttttggtcctctagggttttctccatcctatcctggcccccaagtcaggtcccccaactcccccatcccaccatgaaacctcaaccgccccaggttctctgtgcagtccgagctccctgtcactcacccacatcctgttctcggtggtttcggatcagctcccccagctcaaaattcccagcaatcactgccacctggagggagggggtagaggcaggtcggccaggggggcccaggcagcagagagagggcagggaacgtggcgaggtccctggcccgacccaaaccttccactccgacaatgccgccctctgtcttcttccagctccccctccacggcctgtctccttgctttcctcattgtccccttccttatccactgggtgtcactgtcaccctttccttagccctggaaactccagcacatcccctgcagccccagacctggaagggggtctgtccgttgttgttcttcacatccttgtcggcacctcgatacaggaggatcctggcacaggtctcctgcgggtaatggccagtggcacaggacaaagagagagagaaaaaattaagatcaccatgagtggatgcaggttctgtgctaagagcctcaggaataaatactccaccctaaacccgcaccactgaggacagcagccacctgccaggtacggaccaggagcactttagtttaaacgtggccggcccaaacggagatgcaccatgcatgcgaactacacactggatttcaaggatatgccatatgaaaacaagaaagaatttaaatgtctatagccaggcgtggtggctcaagcctgtaatcctaagactgtgggaggccaaggcaggagttccagaccagcctgggtgacatagtgagacgccccccgtctctacaaaaaaataaacagaaattagccaggcaggtggtgggtgcctggagtcccgaatacttgggaggctgaggtgggaggatcgcttgagctcaggagttggaggctgcagtgagctgagatcaagcctgagtgacagagcagggacctgtctcccccccagaaaaaaaaaatgtcaggtgtggtgacacacacctgtaatcccagcactttggaaggctgaggtgagtggatcacttgaggccaggtatttgagcccagcctggccaacatggtgaaaccccgtctctatcagaaaatacaaaaattagccaggcgtggtggtgggcgtgtgtaatcccagctactcaggaggctgaggtgggagaatcacttgaacccaggaggtggaggttgcagtgagccgagatcctgccactgcactccagcctgggtgacagagtgagactctgtctcaaaaaaaaataataatttctgtattgattctatgttgaaatgataatgttttagatacactgttataagtaaaatatgttgttaaaataaatgtcacctaattattttccccttctctttaacatggccactaggatatttgagggcatttagggtatgtgctcatgctatgttccactggatgttggggccggataatcctttggtgattcattggtttgtggagggtgttctgagccctgtgggatgttgagtagcatccccggtctctaccactagatgccagtagcactcccctccccagtcatgacaaccaaaaatgtctctagacattgccaagtgtcccctgggagacagaagctcccaggttgagaaccacaggtctagaccttacggaggcttaccatgttacgtgccaggcgcttggcactttagaggcagaagctcattgaattgcccaacaattccaggacatggaaattgtctctattttacagaggaggaaactaaggctttcaaaagagcccaaggtgggccaggggtggtggctcactcctgtaatcccagcactttgggaagccgaggagggaggatcgcttgagcccaggagtttgagaccagcctgggcaacatggcgaaaccccgtctgtacagaaaattttaaaaaattagcctggcttggtggcacacgcctgtagtcccaactacttgtggggctgaggtgagaggatcacttgagcccaagaggtcgaggctgcaaagatccttgttcatgccactgcactccagtctgggtgacaaagtgagaccctgtctcaaaaaaaagggggggttgggggggctcaaggtcacacagctggtgattatcagccttggattcgaacccagatctctctgactccaaagtcttctatcttaatcacactttctgccaggcccagaaggaaggggacacacattgtggaggaaagggtgggggcaggactgggccagtggggacagggatgccttctacattcagatcaatttctcaccggtgtcaatcacatggcacccatcatcactttttgggctaagcacaaagtccatgccacggcctaggagggttagggttagctgagctaacctgagctgcctgccctgccactccccaccctgaccctcaccaacttcatcttctaccacctgcccttgctcccaggctgcagccacactggccacctccttcctctgacagcacactaatgccccaggacctttgcacggctgctccctctgcttggaatcctttcccgctagatctcagcatagcttgcttcctcacttcgttcaggcttttgcacaaatgccgcctcttcagagaggtcttctctggccatcctgtctaaaaaaaaaacccttgtcctcttccttgctttatttttatttatttatttatttttaaaatttttttgagatggagtttcgctcttgtcacccaggctggagtgcagtgacacgatctcggctcactgcaacctctgcctcccaggttcaagcgattctcctgcctcagcctcccaagtagctgagattacaggcacccaccaccatgtctggctaatttttgtatttttagtagagacagggtttccccatgttgtccaggctggtctcgaactcccaacctcaggtgatccgcctgccttggcttcccaaagtgctgggataacaggcatgagccaccgtgctcaaccctttgctttattttttagtaccacactgatgtatgtgccaggcactctaagccaatgttaactcattttcttcgtaaccccgtctcactgaaattccatttcctgttatttgtctcagtagtgtctcttctcctctacaccataagttgtacaggggcatgattttgcctgtggcacccaccacctggattaatgctggacccacagggactattcggtagaaggagtgtcctctcccttttatcttggcctggccaaacccaacttggcctccagctcaactctaccccagcgccctctgatgctaatttaaccaccatttcccaagcacctccttgatcttaccccttccacatgacaaatccaccaaggggtttgtatgggcctatgttacaggacaggttcagagagggcagatgctacgcccagggccacacaaccagttagtggagcagttaggattccaacaacctggccttcttcttcctttttttttttttttgagacagagtctcgctctgttgccaggctggagtgcagtggcgtgatctcggctcactgcagcctccaccttttgggctcaagcaatcctcctgtgcacctggccttctgatcctatggttcacctatctcctatgaatggacgactctgactgccaaagtcacacatcgggcagcagagttagcccagtgtgtgttctgggtgtgtttgggagtgtgtgtgtgcatgtgagtctgtgtatgcccgtgctgctggccaactagactgttaactcctgccatgtgtacttttgcgtgtttttcttttcttttcttttcttttcttttcttttcttttcttttcttttcttttcttttcttttcttttcttttcttttcttttcttttgagatggagtctcactctgttacccaggctggagtgcaatggcgcgatctcagctcactacaacctctgcttcctgagttcaggcaattctctgcctcagcctcccaagtagctgggattacaggtgcccgccaccatgcctggctaatttttgtctttttagtagagacagggtttcaccatcttggccagacttgtcttgaactcctgacctcgtgatccgcctgcttcagcctcccaaagtgctgggattacaggtgtgaggcaccgcgcctggctttttgcatgttttcacagccccaacacccacactgggggcacagggccagagcacagcccctaaggtcacctgctcctcatcctactcttacaaagctgagaaggtgtgcaagtcagagttgatggctccctcccctgggcaccaagagaaactcgcatttaacggcatcctagcacttatctcatgtcgtagccatgatttgcttacacgtctgcctcctcaccagactgtgaactcccaccccccccaaccccgccctcgccctccccaggccagatgctgtgtctgattcatctcacatccccaaggcctggtgctgtgcacatagtaggtgctcaaggaacgtgcatggaaaggatgaggatggaggatgtggggttgagtcagtcaaaattcatttgttcgagtcattcattcattggttgagtcattcagtctgttgaaacaagcaaacacctgttgaatgctctgagccaggcactgtgcacagtcttggtggaaatccaagagggctgaccccatcattcattcactcattttcattcattcattcactcactcaacaaagatggaactaggcctgctgtttgctggggtcctggaacagagcaagtaatcagactcaacccccacccttgaggtgctcacagcctagacacggatctgacattcaccaccaaatgctagacgggcatatcaggaggccaaggcggcagaggctgaggaaaaactgtcagactcagccctggctcttggaaagcttaaagcctgggaggaagacaaggggggaaatggaggaatcaagttcgtatgtgttatgcatcggtttgttaagcccatggcaaaggcaagcaaacctattaacccacttgatccttttgcatggtagatatttatttatttatttttttgagacggagtctcgctctatcacccaggctggagtgcagtggcatgatcttggctcactgcaaactccgcctcccgggttcacgccattctcctgtctcagcctcccgagtagctgggactacaggcgcccgccaccacgcctggctaacttttttttgcatttttagtagagacgggatttcagcgtgttagccaggatggtctcaatctcctgacctagtgatccgcccgcctcggcctcccaaagtgctggaattacaggcgtgagccactgcgcccggcctgcatggtagatattaattattgacccatttcacagctgagaaaggagatcaaggaggggaaaatgacttgtgcaactgtcccactaagaaaactctgcctgctgtctaattctaatttttttttttaaggcagggtctcactctgtcacccaggctggagtgcagtggcatgatcatagctcactgcagcctccacctcccaggctcaagcaatccttctgcctcagctgcccgagcagctgggacttcaggtgcatgccactgtgcccagctaatttttgtattttttcatagagaccaggttttcccacgttgcccaggctggtctcgaactcctgggctcaagccatcctcctgccttagcctcccaaagtgttgggattacaggcatgagccaccgtgcctggtctaattctctataccaaaatttctctgtttatctgaacggtacagtttctgtctctcgactggaccctgactgacactggtgatggtaacaatgacaattattattctgatggctgccttccagggatgagcacttagtatacacgatggctcaccctcgtcaataagagctggcgttattcccatttcaggaagaaggatggagcctcaaagagggggagggacttgtttgctccccacccccatctgcctgtggggccagggcttcttccccatcagctgcacgagggcctgggagtcagaggattggttgtgaggcctgtgtcgcagagcaggagacaggagcacgtggggagagaagtgccggcaccatgttggttcggtttgacaaacactgagtcttccctgggctccaggcatactgctggctgccacaaggcggcacgtggccacccgccaaatccccagcactgcaagttctgccgaggcagagggggctgagggctgttttggaagacttcctggaggaagggggctgacagaccagctctgtcatgctagcgcctgtctctctaagtacccccaccagctgcccttcaagggcaggaagcatcaagaaacaggtggggagattgaggctttccatggggctgacctgcccaggatcatctgcagctcaggtggctaaagtaccagaggtcatgacattgaaagacccggctcttgccaaccagctgccacgagcccccctgcctgctccgtacctctcctctcctaggaactccagaagtgggggtgttcttcccatctcccttcagcactcccttcctgctcagggacccaggttgtcaggacccccaaggtcctgaattgctaaaactcccatcccactgtcattcccttcaggggccacgggggctgcacgttggcctttcccctgtgccctgccgtgccgccacgtggcacctgcacacaccactggctgaatgcagacacaggggaactgaggacccacagccccctttcctctggctttctgcacaggctgtgcccccaccctggagcacccctttctcctcttttctactcctgctcatcttaacactgggggcacctcctccaggaagccaccttcacccccagccactccatcccaagcccagtcccagatgtgggctcccgcagggatctggattccctgtgactttgctctgagcactctggactgtagcagcaaactatgttgtctgccctctgctaggccatgagctcaacactttgtccccagcacccagctccaggcctgatacagaggagctcagtaaatatctgttggatggatggatggatggatggatggatggatggaggaatgaatggaggaatgactggatgaaagggtggaaatagtgaagaagtggagggtgcagagatgcagtcaagaggagtgtctgagcttggccctgggggaggcggctatcggggatgtgaggggcctggggtggccgctgctaggcagaccttgttgtagagggcgcagatgtgcagagccgtgttccccgaggcgttctgggctccaggctcagccccgtagaaaagcagatgctccaggtgctgagagtgaccccgctggcaggcctgggcaggacagggagcgaggggcatggatcagacccaggctgttctccctctgggccaagagtctgtctatgacctgtgcactggccttctcatcctatcgttcaccgcatccacctccccatcaccttttagccccgcttcctgctctgggacccaggctgtcagcctcaaaacccaaatgttcagtcattccaaggcccaggcgtctggtctgcctccttaagggggtcaagaggacagcccatccctctcaggggtcaaggcatcaggttccccagcctatgcccccttagggtctttctgccttcacccccaccatttcctctttggggaccatgttattctcacccccatgctctgtgaggaccctggcatctggttcccagccccagccccttggatgcctcagggactgggtcccccaccccagcccttcatggcctgaatcaggagcacctggtggatttcctgccagccgttctcatcagctatgcccagctgggccctgttgaacaggagcagctcgcagcatcgggggtcaccacccaccatggccgtgtggaacagaggggtcagcccccgacggtccttgtagttgggggaacccccaaggtccaggagcgcctaggaacggagagagaacccagtagaaaaacacagatgacagtcacacattaaccagctcattctgaagggccagggggactggaccgtcctgggtgacctacagtggccaatgacagtctcagttctgccgtgatgcccttgtgcaaccttgagcctggccctttccctccctgggccactctgattccgtgtgaacaatgtgggacttgggtagatgcctccagaggacacttgcactctgacatcccacccagccttccccctgggggcgatcttggatgagccattgaaagacattaggggccacagtacccacccattccacttcctacaggtgggttgttggggacaagtgagaggacagagtctggatgctggagggtctctgaccaagtgggaggtgttattaggtccaggatctcaaagaaggggcacagcaggaagccaggggacaggtaagcttgggtaagggcaaggatcgggccggcctcactggggctggaggccacttcctgcccccacttgaaggacagctctgggtgtggaaggctggcaataatgaacattaataggagaaagtcttggcagcaacctcgtgtgaggacagcctgtagcagtgccacccaacagaacgtttcccccatcatggggatggtctgcaactgcaccaccctatatggcaggcacgtgtgggcccctgagcacttgaacgtggctagtgagcctgaggaactgaaattttaattttacttcattctatttaatttaaatttaaacagccccaggtggccagtggctactggcttggatagcgcaggtctggaggctgggaggggcgtgtgtgagcaggatgtgggtttgggggtgagtgtgcatgggagatacatgaagaggatctgttaactccaggggtatactgcagatctttgtggctggcatctgactgcattaggggctcttcaggaaagcatctgagggagagaagggaggggccgtttagctggagcagctgtgcgtcggggtgcttctcaatggctgtctttgggggcagcccatcctgaccctcatgtgaagagcaatcaggtgtcctggcgggggcagggggagaagagtattttaaaattagactgtgcagctgccgctgtgtatgtattttgtgggtgtatgggtttgtctatttgggaaagtgcatttgaggctgtgtacgtggggaaggggctgtatttgcatgtgagagaggagggaggggagctggtgcagtgctggtttggaagggtagctggggggctgttttcagggtgtgtgtggaggggctctatctgggggcatagcagggagctcacttcgtattttaaggaatgagaagggtttacaccttggggagacagaggcagatttggtattaagctgggccacaggggatggagacgttctgggtgtttaggggaggaggccgtgcccgggtctgtgtgatgtcagctatagcccaggtgggtgcatctggggggcctgacaagggtgacaataggggctgtgtctcagtctatggaaaggggctttgaactggggacatgagagggcctatttttaactgaaaccaaagaactgaggtttgagaaagaacaaagggaaaaggagagagggccccatggcggggatggggggtccccgaagcctcaccgtgagtgccaggcagtgtcgggcgcatgcggccttatgcagtgcggtcatgccatcccgggcccggaagtcaatgtgggccccgcccaggcacagggttcgaatcacctctacagagccttcggtctgggccgccagtgtcaagggggtctctgaagggcgggaaaagctggtcacatgaagccccttctcctcccctccatcccttcccattttccaggctctgcagctctccaccccacagcctctggccccgtggcctcccccttggacagcaatgtgtttgggagacaccagtcaggaatggatgtgaatgcagatggcacccctgctccccagctctgtcctggccctgaggtcctcctgatgcgcacccctccctacctcccgaatccgagtcatggtaattggggtccagccccttgtccagcagccgcgccaccttgtcagatgtcccgagctgcacatactccaggaacttcttcaaccccgtctgagccatgggcaaagagagagaagacaggacagtcaggagcaaggcagagaagcagggtcctcaagcagcgacgtccagtgaaaatatacgtggagtcacatacgccattgaaaagcttctagcagcctcctttacagagaaaatacccagccctttgggaggccgaggcgggaggatcacttgggcccaggggttcgagaccagcctgagcaacaaagtgagacccttatctctacaaaaaatgcaaaaaactagccaggttgtggtggcacacgcctgtagtcccagctactcgggaggctgagctggaaggatcctttgaaccctgaaaggttgaggctgcagtgagccatgattgcaccactgcagcccgggtgacagagcaagaccccgtctcaaaaaaaaaaaaaaaaaaaatcagggtggttgggggtgaagtgttagttgtgttgaaattcgtgttaatgatatatgttatttaactgatatagctacaatgttactgtttcaacaggtaattgagatgaaaattattaatgaggttatttaacttttttttggtactaagtctttgaaacccagtgtgtatttcacactcacagcgagtcttagttgggaccaaacacactgcaagcactcaggagccacacttggccagtggttcccaaagtggaccgtgaaagtctggagggatggaacatttaggggaggaaagagttcaatgcatgctgtggtggggagagggtagacaaggagggactgggagtttttccttctcaaggatcaagagttcttcatttctgaccaaagcagttcccgatttcctcccagctctcaccatcgagacacaggacagacaggggctgaggactggcgggcaaggtaccaggaggacagatatggctggaaaggggggtgtaatggttggattttgcagagattcaggctatgaggttgggagaaatgtagcctgtctttgaaatagactctaggcagaaggaccttcagtgtcagggtcctaggccaaggtggggaagtaaagaggccttggatggatatggggggaggcaggggaagagaagggagactcaaaggaggccaggtgggaatgatgtgggcccaggcagagggatgaagggcaaaagaggaaagtaagaaggggttgtgatggggataatggggggtatttgtggttgtctcaaatgtggtacagcatcccaagttaagcgggggcagtggccagagggatcgctggcttggggaatgtggaggtctattgggaagaggtggggagagaaagtggttgggtagggggctccagtggtagggggctataggggatagatgccagcagggttttctcaccttcgtgtgcaacttggccagctgcttctcatccaggttggtctgtttgtaaactcgggtcttgtatcggaactgaggtcaagggtagggtagtgagagagacacagagacttggaatcaggggcctggggagaaggcttggggtaggggaaggtctgatccccttctaattccccggggtagctcagggtgggagtgaaaacagccctggaaccttggtctaggcggtagatgggtggcagtggcttttccgacagtgctgggtattatggtatatgtgcactgcaacccctgccttgaaggaggaggagtctggaccccacagggaatgttctagagtgcctactgtaattgggaatcctcccccaatttgatgggtgaggagaagcttggggcaggaaagtgacttggccaaggccacttagctggtcagaagcagaacagatggtaatttgaactcaggactctctgacttccctgtgatgcttagaaggtctggactcgcacactgggtgccccctcgttaaggtttcgagtgtgttaaaaagtgggtggggggcagatgtgttttagggcatgccttctcttatcagtgaaggagttggggaagcttcacctccaggtaggggacccccttctcaaaggactgggggtactcccgcagcagcctctcctcctccaggaagttggcatcgcggccggaggtggccggttggaacaggccatagttgagcacatcctgcaggctctcgctcagggcacagagcacctgctgcttggccgtccagatggtggcatcggggttgaagcgaaggcatttctggttggggaagagataggggctagggtgggccaggggccagaggagagcctgaggtgggttgggaagtgagccaggagctgagtgtgggggtgattcctgggaggatacccagcaccagtggactccccatgtcggttggggcactgtccctctcctgccgctggccagtgggcaggtactcactgtctggtgcaggtccgggatgccaatcctgaagaccatcatgctgaagtgggcgtcgtctgggacggacattgagcggccctggaggcctctaacagaggccaggctaccaggtgccccactgccctggccccgggtcccccgggggcctcgacctggcccgtctggggagctgtcggactctgagcccccctcgggacactcgctggcactgtggcgttcctcgtcctcgcttgtcgcggggctgtgggtcattgtggggccacggggcgacgggggacggcagcatcacaggcggctgcaggggccaagggcggccatcagactaggagcccgggacccctcagaggccgcaggcgctattcggtggtcaagcggtcaagggcagcctacccccactgcccaagataggcaggaaggaggctggacacaccctcggcctgcacggcctcccctgccgcctcctcccacgctggcacgcacacacccctgtccctgacatgcttctggcatgtgtctccttccctgcccttggccccgcttgcagcccgccccctgcgccccactttgctggtgacccagcgtggccgtgtcccagaaaccgcagaatcaccgcgggagctactggcccactttgccaggccacagaaaatgcagctaaaattagctaaggacagacaggtggacaaactgacaggcatcctgccctcctggccccagcctggcccctcatcccagggccggggggtggggttggggagaagctgaggctgacactgagatgtagtaagggggagagggaggtgtggtgagcctggagcgggtggagctggtgacttcactcaagtgtggctgacaacgcgtggcatgccgaatagtgctggggaatctgccgtcccaggggagcaaggggcactgagatgggggtgtcatgggcagagcatttggcctagggtgtccccaagggaaccacaagaggtggcttttggagactggggcatcttgagagggtgtgcgggtaggtggggaggtcggcctggggagtgctgtccaggtgacagtggtgtggtggcccgggtagatgtgggtggctgcagatgacctgtagctcttttctaggactgcagggtgggtgggctggcttgctgggtactaggggctccactctgaggactgggggtgttaggagggaggctaagaagtgagaggagggtctggggaactgagtgggggatcatctctagatccttgctgttctcccttgaggtggccttatgagggtggagccccttccaaatggggtccgcctcccttctgttctcccccaactcccaccccagcaccggaaaccagaatgtctggtctggtccctccccccaacaccaggcccggttcctgcaccgttgccatggagatgggaagcagtggagggtactgctgactttgggggagtggggatgggctggggggttgggaaagggaagactaaatgtgtgtggtgggaggagagttccaggaggtgtgggcgagcgagcctctaacccagggccggcggacccctcccccacgcgcggcagcgctgcgaagccccctccccctccaggtacccagccacgccgccccacctcgtccctgcggagaccccggctgcctcctccctgccccgccgcacagcccacctcgcgatctggggcccgcagacactccccctcggctgaccctggctgacccccagcctcaaccccgctcggagggggtggccggtgggatgaaagaaaagctggctagggccccccgcgcgtacggctgccccagcccccccgggccggctccggcccctccccctcagggctcgcgggagggagcgggcacgctccgccggggcggcatgaatcaaacgctccgcggctaagaatagctggcacgcagctggtaccgagacgggctgaggaatcggcgaggggggtggtggaggacgcgagagagggggtgccctgggaggctgtggggggacagggggcggctggcgtggccgagagcggggccggggagaatgaatggaggcggagggaggcggggaggggcggggagagagagccggagccgaggctgggaaactggtgggggagaacccggccggggagaggggcggggggcaccggggagcaggagtcgggggcgggagccgagggggcgcgccggccggcggtgtagggactggagacctggtggggacgcagggagcttggacaggggtggaaagggactggaggagcctggaaggagaagcgggagctggaggggtcgaaaggggcggaggaggcccgggcctagaccctcgctggaggggagtggggaccagggtgacctggcggaggggcccaggtacgccagggagggcgaggcgggggagtggccgggctgggcggggaggcgggtaccaggaccgagcccttggccccggagagccgggaggcgggttcgggataggggctctgctggccgggggtggggggcgcgccctcccatcaaggatgcgatctgggacggggcaccggggacccgggcgtaacccaatttggtgtcgcccagggcaacgctccccacctcacccgtacccccagccgcacacccaggccaggagcccggcgccgggccaaggacatccggggcgccctcgccccctcccgcggccccggccccgcagctgccccaaacccccaggttctcgacccccttacctgcctggcggggctgctgagtcccggtcggcggcgcccgcggcccctcccccctccccccaccccccacccccccggagacggggaccctcaggccatgccccaccgccccggagggcgagcgggcccggggagggggcgggcggggaccgggggggagggcgggagggccgaggacctcaccccccccgcgggccgggcctggccatccgcagagcgcccccccttccgccgcggccgccgcgcccctcctcgcccgcccccggctcggtccggccggctccgggcgccgcgtctccgcctgctcttcctcctcctcttcctcgggccgccgccgccgccgcccgctccgcgcctcctctgccacccttctcgctctctcgctctcgctgtctctccctcaccctgtctctctccctccctctctccctccctcccctccctccgccctctcccctccctccgggagccggcggaggagacatcgcccctccccgcgcccccaaacctcgcccatcccccaccaccgccggctccgccccctacccttgccctcccccaccactcctccccacctccgagtccccaaatcctgactccgcccctgcttgctcccataccccgaggaaggggtcctgcccccataaggtgcccccccacacacacctcaggaccaccccctcccagagagctccccgccgccctacacagagtggggcacaataaatatttgttgccagactctacacccccaaatttaagtgtgaaggctatagattcccaccctgtccccccaaacacacacacaccctttccatttaagcactgggtcagggcacacgtggacatacctgggccaggccacatttccccaaggcacaggtgcatagtcaccagctgtaacggcacctgcagagtccccacatacacacactctccagcgcatgcatgcccagacacaatgcacctggggtacacagctacaaacacacccagctacatgcagttgtcacacccctgtgcccgggcacacacgcagcacatgcacacatttgcccaccacacacgcacgtgcgcgcgcacacacgcacacaggcgttcaccccggtatgcatgcccagatctctcaacaccaaaacggagttacagcactgtagagacgtgtgcacgccttcccatcacacccacccaccgtgctgtccattgcactggctcgcactcacccgtttacatgcccaacaccgtgccatccttcccctccaggatagttactgctgacattcctggagcactttctgtgtgccaggctcagggactttcgccatccccattttccagagggggaaaccaaggaacagagaggctaagtaacttgcccaaggtcatccagctgtaaggaggtggtaacaaggatcaggaacaggtaggctggctccaaagtcctcacttgacaactatggtgcactactgggcatatcccctcatagttgcatatccttattcatcacacacagacacacccaaccgtctcctcagagtttgcacatgtctgtgtaggcacgcatatgcagccagctgcaggcagacagctcattcatgcctgggacgcacccacagggacagagcagatcccacagggcagcagtgagtggtgagtgtccccttagcccaggcttcctcattctcccagctccaacagcacctccagggcctgcagggggcagttctaggcagcttctgggttcccctccagctgcaggctctccggggtacccgagtatgagctggaggaggtgcctgctcagcctggggaggcctctatcttgatgcgtacccactagcccaggtggtgagcagctgggcccggggaaagcacagctgcccatgttggctccagcagccagagaggctgtgcacccctgcacactttacaaggcctttccccacatacgcattatttcttgaggtctgtagctcctggtgaggggccccaggttcccgatgggcacctgagaggcccaggctctgaggcagggagcagtctgcccaaggtcacagtgccctcgatgtaccaggatttcttggaaaacggaaggctggaggcactgatttccaaggcccctcctggggctcccggcagccgagggcagatgccctgctcttggagccagaaaccttggctagctgccgccacactggtgacctccagcaggctatgctgtttcagagcctcggtctcctcctttgaagagcaggcccagtgatccttggctggtgtgccccatgcttgttggcaccaccagccaggcctgggcgggaaaagccctgcatgactcatgggcctgacatagaggggcatggcatggcattgttcttccttgcctccaagcctctctcccactgccctcaccacctctacctaccctgccaccaccaccctgggaacttgggtgccagcaaaccaaagaggtgaagcttccaggcctttgaccccaccaggaacggctaccctctcgcccactcaacaggttgattgaacacctactatgtgctaggtaggccttgtgctaggagatgcatcagtgcataaaaatccctgctttcattggcagggaacagacataaacaaacaagatcatgccagtcttgattataccaaaaagatgaaatggggcattttaataaagtaacttgcggaatagataaggtggttggggaagacctcctggagctgagacctcgatgatgagaaggagctggggaaagaggcttctagaaggaggaaagggctagtgcaaatgctctgaggttgtaatcagcttagtatttggggatgagccaagaggccagggaaggtggaggctgggggtgggtgaagggaatgggggtgatgaggctgcagaggtgcaaagggttcttccttcccagcccccagcatggtaggctgcgctgaggactgaggcccgggcttggcttccctcctgcttatgatgggaaggtgggggagcaggggagtggggagtgatgtgatctgatttatggtttggaaggattgctttggctgcggcaagcagccgggattggaggggctcaggaggaaggagggggagggcgagactgcagtggtccaggctgaaatgaggtggcttgctgaatgctcagagctccttgagcacacaacctagcgtctgtcgatttcacctcctggagaaaccttccctgactgctccgccagactcctcaccctctcccatctccagccccctcatccccggagctatctggctgctggtctgcaagcagctggagtccccagcatcacccagcccacagcctggcctgcaggaggcttctagtaaagtggccaattaatccccgagccccgtcttccagggtcatgcacacagtcacacgcgtgctcttcacatgtgtcaccctgcccccacacacactcacttggatctccagacaagggcttggagggtaggatgggcaatctagggggcaggaggggccctggagtctcctccattgagtgtgcaggcgatggtggccacagggtaataacaacctcagcgagaccctgaggtctgcccctccttaggaatggccaggcagggaagaagggagcagtgctcggtcccagcatcccaccactgccgagatggttctgagcgggttcctgggctgaggccggggcctgtgttttccaagattccttggagagccagctccatcctcttcctgattatctgatctttgggctacagcagaaggaaagagcagggcggaagcgagctctggaaagtggaaagaggagggtgtgcgaggagacccaaggcgggatctaggctttggaacgttggaggtttccggccacagaggcagggcctccggggagccaagaggggcggggagagacacacacagagaagcagaggagaccaacggaccggacagagacgaggagaggaacaggaagagagaagctgggagaatcgggaacctgggggctagtgacctgcacacagggcaggggcactcggcagttcccagaggccacccctcccaccccagacatccagacatctggaactttgggtgccaagagtccagcttaatgcaggcagcctggcttttgggggctttggtggtcccccagctcttgggctttggccatggggctcggggagcagagagggagtgggagggaggctggggaggtgcccaggaggaggagcgggagagggaggccctgatgctgaaggtgagctctggagtgtcagggagctatgggtggtgaactgtgggtctgggagggggtattgcaaggttagggaaatggacaatgaggagcgattgggatagtctcagaggagtgggagggtgatgggctcagagacaggactcaggcagcagagaatgagttatgagttggaaaggggtgaatggggcatcttggtggcaggctggggctcaccacccctcccctgccccagcatctgcaggaagccctaggactgcctgctgggaggggggatgagaatcctgccggaactgttgagggaaaagaggactgggagatggaggaggaccagggggaggaagaggaggaggaagcaacgccaaccccatcctccggccccagcccctctcccacccctgaggacatcgtcacttacatccgtgagtaaccagaagccctcacccccaaactcctaggccgccgcggtcactttcgcaaaaatgaagggtcggttcactgccaagtggcctttcagttgtccattgcccagcccagagcccccacacccctaggagccccaggtccacggccatgcctcctaaaggcctgggccactcgaccctaccttccaggagtccggggtgccccccccaccgccaccccgccctcaggagccctagatcccagttctccaggtcctcaggccccccgctgcatctccaggctccccctccagcatgatccctgtctgtccgcagtgggccgcctggccggcctggacgcaggcctgcaccagctgcacgtccgtctgcacgcgttggacacccgcgtggtcgagctgacccaggggctgcggcagctgcggaacgcggcaggcgacacccgcgatgccgtgcaagccctgcaggaggcgcagggtcgcgccgagcgcgagcacggccgcttggagggtgagtccgcggcgcgcggggtggaaaaaaatgagactatctgggccaggaatgggactggttgagaaggtgaccctaggtgtccggggcgggagagttcgggagagctgctgtgtgctagcggacggggttagagagctgggaggctgaatgcagggagcgggtgggcactccagacccgcgcggacccgactggggcagcaccacgccccctacagtccagctcccaccgcctggccccgcccctggcggaccagactctccacctcctggctcccgcggttctgaccacgcctcctcccagccctccccatgagttcctggccccgcctccctccacccccggatgttttgtcctcgcccccttccagactctgaatgcatgaccccgcctccttctctacccggccccgcccacaggctgcctgaaggggctgcgcctgggccacaagtgcttcctgctctcgcgcgacttcgaagctcaggcggcggcgcaggcgcggtgcacggcgcggggcgggagcctggcgcagccggcagaccgccagcagatggaggcgctcactcggtacctgcgcgcggcgctcgctccctacaactggcccgtgtggctgggcgtgcacgatcggcgcgccgagggcctctacctcttcgaaaacggccagcgcgtgtccttcttcgcctggcatcgctcaccccgccccgagctcggcgcccagcccagcgcctcgccgcatccgctcagcccggaccagcccaacggtggcacgctcgagaactgcgtggcgcaggcctctgacgacggctcctggtgggaccacgactgccagcggcgtctctactacgtctgcgagttccccttctagcggggccggtaccccgcctccctgcccatcccaccacccggcctttccctgcgccgtgcccaccctcctccggaatctcccttcccttcctggccacgaatggcagcgtcctccccgacccccagtctgggcgcttctgggagggctcttgcggtgccggcactcctccttgttagtgtctttccttgaaggggcgggcaccaggctaggtccggtgccaataaatccttgtggaatctgacttgaggggcagtgaaggcagtcttggactttatctcctgcaggggaagccgggaagggccagaccctggtctttgggcgcgtgtcctggcctttggatgcctgttctgctttttacagatgtcatttgagccccagatggagtgatggagaaacacaggtgcatatgtacacacggtcatctgttctgtgcacagatggccggagtacacgcgtacaaacgctgtagacaccttcacctccatcgtgccctctctctcggcctttgggacccagggcctgccagttgtcccaggccttggtcttggtcctggtcaaagagatttgggaaacgtgaaggggctaaaggctctgacaagtccggcaggaaagagcccgtttaatttgtttaagtggcgtgtccaatttgtttccccagatgatatggtttcatggacttgttgggatgatatattgagacatggacttaaggactcacccaaccctgaagcttagacttcctcccaattttccctcctctgcttcctgccagtgaggccaggagccagtcccttcccctctgtgagcctcgggtttttcatctgaacgtgggcacaatccctcctactttgtgcggctcttgggatgttcaggtgagaccaggacagtgtgcatttggtggtggctgaacttgagccacacactaccttccgtcctcacctttttttttccttttttgagacacggtcttgctctttcgcccaggctggagtgcagtggtacaatcatggcttactgcagcctcaatcttctgggttcaagcagtcctcccaccttagccccccaagtagctgggactacaggcacgccccaccacacctggctaatttttgtatttttttatagaggttggttttcgccacgttgctcaggctggtcttgaactcctgagctcaagcaatctgccctcctgggcctcccaaagggctgggaatacaggcatgagccacagtgcctggctctccctcaccatttttcatacctttactccctgggggcagtgaagacacccaggagtccgccagccggggcctcagcatagtggccagctctgtctagaggagaggctctttggaaatcaccctagtacctcccccaaggttggcatcatgggcgtgaccctgacatcagggagcctaggaatggggatgtgaccctgtctgtccttaccactctgccccttcccttccttcagccattgcaccactgcctaaagggtgaccattggatccacacatgggaggagcaagccatcactgtcagcttggatagaggggagatcacccacccttctcccttcaggagacatttctcagccccacatccccagaggaatacagaataggagagtgggggtgtggcctggagtcagccttccatcagaaattcttctcatgctgagcttcagtttccccggggagggataggcagccctagatcttatagccaaccagaggtcagattaggcagacaatgatgagtatctattatttcccagaggggtctctgccctggcagagcttccattctggaaagtatttgggcatggtacaccatggctacccgcccagattctagagccagatggcccaggttccaatcctacctcagccacttatctcctgggagaacctgagtgagacataaccttgctacttctcagtgtctccatctgtactgtggggataataacagtattgatctagaatagtaccagacacagaggggtctttgcagttcccagatctgagcttcaccagggcaattcaacctcaccttcatctctctgtactctctcctgacactgtgcttttgtatatgcaaagatctccatcctccctcctctctagggtaaacacccacttccaagaattggataacacatcaccccaacaaccagcccttcccccagccccttgcggggttagggatcccctttggtatccacaaaccccttgttcctctcttgacccagccctgatcagacaggctgagggacactccaggtgcgtgggggagggcaggacaaggtatgactatctctgtccccagcatcgcctggcatatgggagccctttgaatgaagatgcttgtgtggcatcatgcaggggaccctgagatgagtcggatctcggctgcttttcctccctggcctccccaaggctgggtgaggcaccttctctagtttcccgtagggtccagggctttccacatcactttaggtgccactgtctggtctgacagacaatgtctgtctccctggcagggcctggagctatcataccaagcacagggccagctgtgggcatgcagagagagaggtctgaagtggggagtggcgtgcctgcaaggacggtttatgcatcagaacagcacgcctatatgtggcattcggcgctgattcctgactctggtctgcgtgggaaacctactctctcctccaggaagcccccccagacttcctgcgggccagagtttgccaatgtcctctccctggctctctgcggagcgctggtagtgtgcaaggccagagccatggaccaggggaggcctcggcagctgattggaatagatgcattaagggatcccagggaagtagtagaacaagggcaggaggcctgggatgattcgacggaggaggaagaaccagcggccgcacgggcttgcagggcgataaagcccaggaggccgagcagcaggcgcatcaccgccttaccagcaccacgtttttccgcagtaaccggatgactcctacgggtcacctcgcaagccccgccccctcctcccatgtgaggttcgcctgcctttccccgcaagcctgagggccacgccttggcggtgaggtcggagctccgcagtctccaatcagagctcagacccctcctctccacccaggcctcgccccgaggtactctggaaaatgtagtcctgtcacgcgcccacgggtaggaaaaccccaagtcgcgaagccttaacattcaactcacgtttggatctctcagacgagagtttttcaaaacaggtgcatttccttgggtagatcataaccactttttaaaaagtgaaaaaagttcgtatgaaatattagtatcatagaaaatggtaagacgcttttcaaaatttaaacgtcgatatgctgaattaacaatataaaattcaatataaaatttctttgtggctaaccactggtccaaaccaacttagtttctttcttttctatttattttcaggttctgtttttttttttttttttttgagacagagtctcactctgtcgcccaggctggagagcagtagtggcacaatcatagctcactgcagcctcgacctcctgagctaaagcaatcctcccgcctcagtttcctgagtagctgggactacaggcgtgcaccttaaaaataaacaaaaacaaaaaacaaaaaaaccagacaattttaatttggaaataattttaaacttatagataacctacacaaatataaacactggagtacaaacaaatcctctactctgatttgtttgttaacagtttacctcattgctttggcttcatcattccatctatccatccatccacccacccacccacccatcctagcccaatcatcagggacaagcaagacaaagtcaggtttgttgacccactgaaatgagagcgatcagcccccagaggagaagctgcaatcaagttataggatttggaagaagagagaaatttggatgaaatttaagtgaaacaatgtttagctaggtttagaacaaggtaggaatgtgtataagggagtcagcatcaggcctgggccgcatacagtagctcatgtctgtatcccagtgctttgggaggccaagacaagaggatcgcttgaacccaggagttcaagacccgcttgggtgacatctctatggaaggaagggagggaggggagggaggggagaaaaggggaggggagtgagggggggagggaaggggaggagaaaattatctgggtgtggtggcacacgcctgtagtcccagccacttgggaggctgaggtgggaggattgcttgggcccaggagtttgaggttgcagtgagctatgattgtatcactgtattccagtctgggtgacagaacgagatcctgtctcaaaaaaaaaaaaaaaaaaaaggaaatatcagatttggactgcaaagtggacctaaggtcttgtttccctggaaactacaatgttaatataaatgtggcatgctgtgcccagaaactttttatttaaaactctgcaccagggctggaaatggaggcttcttatctttgtcaaagtgacagatcttccaggaaagaaagatgagtctgtttcattcttacggatagactttcataccgcagagtttcccacagtctatgattttagagaacaaagtttctcagtgagtaagatagcagtagtcgctcataaagggggctgttagaacacttttactgctgcagctcgcccctgggtgaaatgtgtcctgttaaccttgcggttggctttatctcagtctatagatgaagggcaggccagatttttatagtattagctggctttagctcatatatatatatatataatttttcttttcttttgctgcctttctttttctttctttctctctcccatctttctttcctttttcttttgtctttttttttttttttttttttgagatggagttttgctctgtcattcaggctgaagaaccatggtgcaatctcggctcactgcaatctccacttcctcagttcaaacaattctcctgccgcagcctcctgagtagctgggactacaggtgcctgccaccacacctggctaatttttgtatttttagtagagacaaggtttcgccatgttggccaggctggtcttgaactcctgacctcaggtgatccacccgcctcggccccccaaagtgctgggattacagttgtgagccaccgcgcccagccagttgtcatgtctctttagcctccttgaatctggaacatttccatatttataatattgacattttggtggccgggcgtggtggctcacgcctgtaattgcagcaggttgggaggccgaggcgggtggatcacgaggtcaggagatcgagaccgtcctggctaacatggtgaaaccccatctttactaaaaatacaaaaaattagccgggtgtggttgcaggcgcctgtagtcccagctactcgggagcctgagacaggaaaatggcgtgaacccaggaggcagagcttgcagtgagccgagatcacgccactgcactccagcctgggcaacagagcaagactccgtctaaaaaaaaattttatatatatatatgcacacacattttggaagaacagctccttgcccttttaaaaatagaagttccacatttttagtcggtctgatgtttccccatgatgattagattcaagttatacattctccaccagaataatgaggtgaggtgtgtacttctttgaaggtatcccatctggacatagtcagtgtcctactgtgcctcattagtgaagtgagttttcatcacccagcgagctgatgtcccattccccagctctataatactcctttgcagctaataagcagtccaggggcagatactttaagacaggcagtatctgcctttcatcaaaatttcccccttgatttcgcacccattgatgattcagctgatgtgggcttattatgaataacaaaagatgctcctggcctggtagggtggctcacgcctgtaatcccagtactttgggaagctgaggcgggaagatcacttgaattcaggagtttgagaccagcctgggcaacatagtgggatcttgtctctaaagaaaatataaaaattagcctggcatggtggcaagagcctgaagtcccagctacttgggaggatgaggtgggaggattgcttgagcccaggaggtcgaggctgcagtgagctgtgatcatgccactgcactccaacctggacaacagagggagaccctgtctgaaaaaaaaaaagacaagaaaaagaataggacgttactgttaaacgccttctcccatccccctcgccagtacctaccatcctgacttgtgtttcgccgttgcttgattttcattattattttagcatgtgtgtatgtttcccaaaaaacatcttatttagttttgcttgttttttgggctttggagtaataatacacgtattcgttgtctcgaactgcccttataaagtaccacaggctaggggactgaaacagcagaattgatcatctcccagttctggaggctggaagtctggagatcaagatgttggcacggttggtttcttctgaggcctccttctttggcttgcagacggccgccttcttgctgtgccctcatgtggtcctctctgtgtgcacatccctggtgactctctgtatggccatatatcctcttcccataaggatgaagtccaattggattagggcccaccctaatggccccatttaaccttcaccacctctttagagatcctatctccaaatacagtcatgttctgatgtactgggggttagggctccaaaatatgaattttgggggctgcatttcagctcacaaccatatcttactgtatgcaacttgctatttttttttttttttttgaaacagagtctcgctctgttgccctggctggagtgaagtggtacgatctcagctcactgaaacctccgcctcctgggttcaagccattcgccttgcttcagcttcccaagtagttgggactacaggcacacaccaccacacctggctaatttttgtatttgtacagatgaggtttcaccacgttgaccaggctggtctcgaacttctgacctcaagtgatccacccgcctcggccttccaatgtgttgggattacaagtgtgatccattgcaccctatcaatgcaacttgctttttaaagacaaactcctatcactaagatgcgttcgtgatggtgcctgtagcttttgtttgcacatttttcaggggtatggtatgaaaatgcttaaaaataatgtggggagaaatcgatgaaatggatgggggaagaaaagaagattaacaaaactaaaagctattctaatttttgaaaaagcaactaagacagacttacttttggcaaaccgattaagaacaaagagacaggctgcaaataaaatacaaattgtaaagtggtgaataattacagccaggacagagatataaaaagtaattatattatggctatgtgctaacattaaaaacctgaatgaactggttaaattactagcaaaatatacaatgcgaaaatgacacaaaattacagactgaataagccagtgactattgaagaatttgaaattatattcagagatctcccctctccccaaaaaacccccaggcacagatggttttctaagcaagtgataccaaacattcaaagaatgtttaattcctatcttgtatgaattattccagaaaatcgctggaaaattatgtaataactgcctgattcatttttagagactaatgcaatgttgaatccaaaatcggataaggaccagatgcaagaaaattatagattcatttcgcttgtgaatgaagatgtaaaaatcccaaatcaaataattgccacttcaatccagcatatcataattcttcatgatcaaataagatttctcctcctaatgcgaagatggttcaaaaattaaaaaaaaattctttcaatataattcaccatatcagtagaccaaggaagaaaatataatgatttcaactgatgtgggaaaataatttcataaggctgtacatctatttacgattaaaagttaaaacactccactttgggaggctaaggcaggaggatcgcttgagcccaggagtttgagaccagcttgggcagcacagtgaaaccatgacatggtggtgtgtgctggtggtcccagctacttgggaggcagaggtgggaggatcacttgagcctgggaggctgcgtggttttgaattgcatttctgtgatgattaatggtgttaatattttcctggacatttagcccatttatatatcttctctgggaaatgtctgttcagatcatttgccccttttttgtttggtcgttttattttattttttgagacggagtctcactctgttgcccaggctggagtgcagtggtggaatcccggctcagtgcagcctccacctcccgggttccagcgattctcctgcctcagcctctcaagtagctgagattacaggcacccaccatcgtgcccagatagtttttgtattttttagtagatatggggtttcgctatgttggccaggctgctctcaaactgctgaccttaagtgatcttcccgccttggcctcctaaagtgttgggactacagctgtgagccaccacgcctggcctcacccattttaaaattgggttacttgagttctttgcacattttattttttgtttttgctttttggagggttactgtatacatcttaatttatcagaatcagtttcagatttatactagctttattacagtgagatatagaatggttattcctagatagttctattccatttccccttgttgtggtatcattataaacttttttttttttttttgagacggagtcttgctctgttgcccaggctggagtgtggtggtgcagtctcagcttactgcaacctctgcctcctgggttcaagctattctcctgcctcagcctcctgagtagctgggattacaggcacctgccaccacgcccaggtaatttttgtatttttagtacagatggggtttcgccatgttggccaggctggtctccaactcctgacctcaggtgatctgcctgccttggcctcccaaagtgctgggattacaggcatgagccactgcaccagacagtaatgcattaagctttgaatacctaagctcaagagttgacatcaacctttccccacagataattctggtgcttgtgaactagtggtctccgtagatgtttgccaccaagaaggtcctggggactcgcaaaaacagtctgtgggagatggatatgtgagtctgcttctaagaggctctttggccgcctctggcacacggggccatctctctcctgcttgccctctgccctcttctctccctccattttccataatttcaacaaaatcagttaatatttacaaagcactgagaacagcacttgggactcagtaggtgctaaaaaaaatcatcagctgcttcttttttttttttttttttttttagacagaatcttaccctgttgcccaggctggagtgcagcagtatgatctcagctcactgcaacctctgcctcctgggttccagcaattttcctgccttggcctcccaagtagctgggattacagatgcctgccaccacacgagctaagttttgtatttgtagtagaaacagcatttcaccatgttggccaggctggtctcgatctcctgacctcaggtaatccacatgcctcggcctcccaaagtgctggaattacaggcatgagccaccatgtctggcccatcagttgctattattagcattattccttctggggaatgttttagatactgcatttcatggactctaagaaactccacttttatggttgttacaaagaaagaaaagtgtatactgtctataagatgcaacaatgcttccttaccacttggaatttttatttcttatttactgaaagagcttttatgggtgtatttattgcgaacaataaaggaaaatacaagtaaaataaaggattcctaaaattgttccacaattgagatcctttttttttgtttattatggaaaagttatacaaaaattagctggacatggtggtgtgtacctgtggtcccagctactcgggaggctgaggtgagagaatcacttgagcccgggaggtcgaagctgcagtgagtcgtgatggcgccattgcacgccagcctggatgacagagtggcgggagggagaccctgtctcgaaaaaaaaagaaaaaaaaaggttgcgtgtaagaactaaaaatcattactgctgggctcttgatccagctttgcaattagaggagacagtttattgctgacttctgttttcagagcaaacaccaaacacaacttattccccaccaattccccctgacccacccaggcccaccaagttggttcccgggggctgagagtgccccactcttgtctgctggattttcttctgggctgtggacaccccttctgcaggttttcatgcctttcaaacagcagtcgtatggtgccagacgttgaaagatgccttccggtttcagaggcgtcaagatatgggaaaagtggcttcttagaattgatcagttacgatgtgtttttcaaaggtggcgtctcctttactgcaggcagttccttctctaagggagagcttgtgggatgatggttgttctccccaggctctactctgcctggatttgggcactgcttattgccaagctgatatcctaactaatattttcaagtgggcagcctggtttcggatacttaatttctagcagcatttcccctgctgccacgccatcttcagtcttttaaaattgtagtaccctgggaagagtttatggcattcttacccaattccttcttggcgcaaatttaaggtttttttgtttgtttgtttttttccttccctaagtgttttgctattgcaatgtcaaactaaataagaaacacagagaggcttccaaaagaaaatatgttatctgggaatagatcactgcagtgggaaatgcatgtcatagtaaactatgtgcgtatgcagggaggtaaaggaagaagaaggtttttaaagggaaagaagaggaggattacatattgtttcgaaataattatccttggctgcaaagatcgataataaaggtgacaccagtctgagggtgaacaggcaattgtgggggagatgtccttgagtatttttggtggcaggttgtgatggcttttgtgccaggttgtggtttttatagagtcttgtaataggtgttgttggtttttgtttttgtttttgttttattttgtttttgagatggggtctcactctgtcacccagactggagtgcagtggtgtgatctcagctcaatgcagtgcagcctccaactcctgggctcaagcgatcctcccacctcagcctccggagtagctgggactacaggcacataccactatgcccagctaatatttggtattttttgttgagatggagattcgccatgttgcccaggctggtctccaactcctgggttcaaattgagcctccctcctcggcttcccaaagtgctgggattacaggcatgagccctcataccacgcatgtgatagtttttgttatcaagcatacaagcatgataaccctctcttcgtggctctagttgtcaatgtttaaaaatattagtacctagggatgggtgcggtggctcacacctgtaatcccagcactttgggaggccgaggcgggcggatcacgaggttaggagattgagaccatcctggataacacggtgaaactccgtctctactaaaaatacaaaaaactagccaggtatagtggcgggcgcctgtagccccagctactcgggaggctgaggcaggagaatgtcgtgaacccaggaggcggaacttgcagtgagccgagattgcgccactgcacttcagcctgggcgacagagcgagactccatctcaaaaaagaaaataaataaataaatactagtaccgagggatgggcgcggtggctcacgcctgtaatcccagcactttgggaggccgaggcaggcggatcacgaggtcagaagtttgagaccagcctggacaacatggcaaaaccccgtctgtctgtactgaaaacacaaaaattagctgaacgtggtgttgctcccaagtaattccagctacttgggaggctgaggcaggagaatcgcttgaacccgggaggtggaggttgcagtgagctgagatcacgccactgcactccagcctgtgccacaagagtgagactccgtctcaaaataaattaaatacataaataaaataaagacaaaaatgttagtacctctattttgattttggtgatttttacaataaatagtgctgcaaatgacacctttggggatgaagcttttgtccgtgtttaggattttttctttggtctcgattcccacaagtggaccccaagaaagaaaagatcttgtttctgtcactcagaaggtcctgacaaccctacaaccgagcaggagagaggctgccctggcctgccgcaccgccccgggaattcctgtgagattgttccctggttgttgatggacggggttggattttgatttcttgtgtgcgggagcgtcttcctgccatgatggttggccactccctctctttccgatttgcagatgtgtctccttgtcttttgcccacttgcctactggaatccaactttgttgcttttctgtgtggtttacatgataagattattgacgctatttctgtcacaggggatataagtttttttccaagtctatttcttgacttataattttagtgtgagttttgttttatacacagagattttaatttaaaggctgtcaaatctgtctccttaatatgagaaaaaaggaaaaaaattagcattttttaaataaaggcataatttgcatacagcacaattcaccctttttaggtgcagttctgaggttttggcaaatgcacgcatcacgtgaccaccccgcaaccaaaacacagaacagttccatcaccgcaaattccctcacaccccgttacggctcaagtgttcaaaacataagaaagctaaaagaatagacgtgaataggcaattcttttctccgggttgctctatgttttaaaagattgacccccaatttttttgtctttttttcttgaataaaaccgaaaatgccaaatttcagggggaggaattgcagctcaaactaaaattggtagttaaagagtcccctgccatccttgttcttccctcagataatgagaattgttaacaagttccttcctttccctccttccttccctccttccttccttccttccttccttccttccttccttccttccttccttctttccttccttccttccttcctccctttcctccttcctttctttaaatagagatgggttctcaccatgttgcccaggctggtctcaaacccatcctgggctcaagtgatcctcctgccttggcctcccaaagtgctgggattacaggcatgagccaccgtgcccacctaagtctttcttttgagggctttctctctgccttttatttctcttcacgtattcattcacgcaccaggcacaggtggagccccgccatgcacgcccgcatctgtgcgtgttccacagtgtgcaccattcctgggctccctcatgcatttcacctaacagcatcattgtcacgttctcctccaccatagcacagagcgtctaagggtgccaccctctcccataactagagacacatgagtgacagcagcaatgagctgtcccatctgctagtcgtcgacacagaagagccagactgagagagctgggtgccaatcacaccacgcagggacaggctgtctgcccagaggaggccggtggtgtccacacctgcctcgctggggccgtttcaacacaaatcttccagcagttcttaactgaacgtctgacctaccgactccactttcgggagtttatcctttggtgatattttctcaaagggccaataatcacagtggctcacagaaaagagttctccgtgtttgccggatatcctgctgagaatttgacactttgatctcatttaaaccctgcaacaaccttgaggtgggtgctgttgttacttccatattagagcggaagaaaaggaactcagagagatgactttacttatccaagaccacccagccaggcggcagggctgggaacccaagcatgaagtgaaatagccccgccctggactggctggatggtagccacagtctacatgtgagtaagacactgaatttaagaaaagaaatcactttattaagatataatttacataccatgcaattcacccacgtaaagagtaaaattcaacggttgttggtatattgcgttattcatttttaacattatgttaatgtgtggcataaaatttccattgaaccgtttttaaatgtataattcagcggcattaattacattcataacgttgtgtaaccatcaccacaatctatttaaaaactttttcatcccccccaaacggtaactctgtaaccgttaagcagtaaatcccctttctctctcccccattgcctgatgaagtaggaggtgggactagactctggaggtgggacttgcactcaggatcaaattgaagaccagctgaaacagggaagaggggaaagcgcttctccataagacacgcccaccagtgccatgtcagtttcccgttgccatgacaacaccccgacgttaacacccctctccatggcagtgacttgatgacctggaggttaccaccctttttctagtcactagtggataatctgtaccttaatttgcatataattaaaagtgggtataagtatggctgctgggcacactgcctatggggtagcctttcaggcaaggagcagtacccgtgtcgctgctgtacactgcggcttcgataaaagttgctgttggttaggcatggtggctcacgcctataatcccaactaggaggctgaggcaggaggatcacttgacatcaggagttcgagaccagcctggccaacatggtgaaactctgtctctactaaaaatacaaaaattagccaggcatggtggtgggcacctgtaatcccagctactcaggaggctgaggcagaattgtttgaacctgggaggcagaggttgcagtgagccaagattgcagcactgcattccagcctgtgcagcagagcaagactctgcctcaaaaaaaaaaaaaaaaaaaaaacaaaacagttgctgtctatactttctgatgacaggtaaaaagaagttgctgtctaacacctccagctcacccttgaattatttcctggccaaagccacgagccctcccaggccaagtcccaatttggggtctcacctgtctagcatccctgggacaacagtaggagccgcttgagcttgtggcttctcctcagcaaatatgggaaacagagaaagatctggaatcagacagaggttggtgtcatttctgcctgttgtaacctgtcatctagggcaggtccctctcttcctggggctctcagtcaggttctgtacaaggttctcaccctccccacggaaggaggctgccaggaggagccagcaaagctattcaacttgcaggggctccagaatagcctctcctgtggcctctgtccactccctacccctgcaccttcagcaattcccacccagtggcgaccgtaagatgcccagacacagagcattatttctgctctttcactgcatacccaatgttagtccaaactgcaccattttggaagccttctgccattttgcaggtcaaagtgaaatattccacgggggttcaggcggggagaaacatccttatcataccctgccgtgcaaaggcccgactgaaggaaaaatccctgtcatatcctgctgggcaaaggtccaaggaatatcttatcacatcccactggaaaaagggccaaaccgcctgatcgcacatcttatcaatatcctgccaggcagcaagccacactgctcagacccctcccacccatacctttaagtaccccagcctataagcggccgtgggctctggccctaagctggtcccccatctccgcaggtttttgcaatatacctatgttgctgttgagcccctgtctctctctctctttccctctctctgtttgtgtttgtttgtttgtttttttgagacggagttttgctctttcacccaggctggagtgcaatggcacgatctcggctcactgcaacctctgcgtcccgggttcaagcaattcccctgcctcagcctcccgagtagctgggattacaggtgcccaccaccacgcatggctgatttttgtatttttagtagagttggggtttcaccatgttgtccaggctggtgtcaaactcctgacctcaggtgatccacccatctaggcctcccaaagtgctgggattacacgtatgagccaccgtgcccggcctgtggtgtcattctttaaccctcgccttcccttcaaaacctaacaccctaaggactggaatgcctgcgccacatactcagccatgtgggtgggtctgagctctggcctgggctccctgtggggaggctggttgggagaggagacatgatgggattccagccctgggactcactgccttgtcactggagcgggtttcctcagctctctaggtctcactttattcattctgcagtgaacattccctgagtccctgctgtgaggctcacacagctgtatccaaccaggagctccatcctaaagggatcccaagaggttcttcccccaatttcccagttctccaacatcaaccaggtgcccaaccattcaattcagttccaacattgactgcccagagttagtgtcagatgctgcaggttatggacttgggccacaaaactgcccccacctcaggccaggcgtggtggctcacacctctaatcccagcactttgggaggccgaggcaggtggatcatgaggtcaggagttcaagaccagcctggccaatacggtgaaacccccgtctctgctaaaaatacaaaaattagctgggagtggtggcacatgcctgtagtcccagctacttggaaggctgaggcagaagaattgcttgaacctgggaagcggaggttgcagtgagccgagattgcaccactgcactccagcctgggcaacagagtgagactccatctcaaaacaaaacaaaacaaaataacaagcaaaaaaaaactgcccccacctcagatgccagctacagtagggtgtccacactaccttaatttctgcccagccaatcaccagttcaggggttcccaaaactctcactgatatggtttggatgtttgtctcctcgacaaatctcacgttgaaatgcgacctccggcgggcgcggtggctcacgcctgtaatcccagcactttgagaggccaaggcgggtggatcacgaggtcagcagatcgagaccacccgggccaacacggtgaaactccgtctctactaaaaatacaaaaaattagccgggcgtggtggcgggcgcctgtagtgccagctactcgggaggttgaggcaggagaatggcgggaacccgggaggcggagcttgcagtgagccgagatggcgccaccgcactccagcctgggccgcgccaccgcactccagcctgggtgacagcgagactccgtctcaaaaaaaaaaaaaaaaaaaaaaaaaaaaagaaatgcgacctccaatgttggaggtggggcctgatgggaggggtttgggtcatggggcggatccctcatgaatggcttggtgctgtccttgcagtaatgagagttcccagtctgtgagctcgtatgagatctgactgtttaaaagagtctgggtcggcgcagtggctcacgcctgttaatcccagcactttgggaggccgaggcaggtagatcacctgagatcaggagctcgagaccagcctggccaagatggtgaaaccccatctctactaaaatgcaaaaattagtcagatgtggtggcccatgcctgtaatcccagttactcgggaggctgaggcagaagaattgcttgtccccgggaggtggaggttgcagtgagctgagatcgcaccaatgatctgcactccagctggggcgacagagtgagaatctgtctcctgccccacatcaaccaaaaaaaaaaaaaaaaagagagagtctgatacctcttccttctctctcttgttctatctctcattgtgtcatgtgctggctccccctttggcttccaccatgattggaagccccctgaagccctcactggaagcagaacagatacaggtgccatgcttgtacagcctgcagaacagtgagccgaatacatctcttttctttatgaatgacgcagcctcagacattcctttatagtaatgcaaatggaataaaacacctactcaaatacactaattcgctacaggttgggcacagtggctcacgcttgtaatctcagcactttgagaggtcaaggagggaggattgcttgagcccaagagttggagaccagcttgggcaacatagcatgaccccatctctaccaaaaataaaataaattagccaagtgtggggacatgcacctgtagtcccagctactcaggaggctgaggcaggaggctcatttgagtccaagagattgagagcacagtgagctatatgatcaggcaactatgctccagcctgggtgacagagcgagaacttgtctcagaaaaaaaaaaaaaagaaaaagaaagaaaagaaaaagaaaaaagaaaaaacaatcactagaacaactcacagaattcaggcaagcattttacttattattactggtttattataaaggatagaactcaggaatgaaagagatacatagagtgagttatggggaagagcatggagctgccaggtcctctccaggcaccaccctcccagcacctcaatgtgctcaccaggcttcatggtccaggggctgtgtgtatatatgtgtgtgtgtgtgtgtgtgtgtgtgtgtgtgtgtgtgtgtgcgcgtgtgtttgagatggagcctccctctgtcacccaggctggagagcagtggcgtgatcttggctctctgcaacctccacctctcgggttcaagtgattctcctgcctcagccttccaagtagctgggattacaggtacgtgccaccatgcctggctaatttttatgcattttgggtagagacggggttttgccatgctggccaggctggtctcgaactcctgacctcaggtgatctgcccaccttggcctcccaaagtgctgggattacaggtgtgagccactgtgcccagcctctttgtattgctcttgtaacttttctgtaactgtgaagtgatctccaggttaaaaaaaaaatgtaccccgcataatctcacttatatgtggaatctaaaagagtggaactcggctaggcgcagtagctcctgcctgtaatcccagcatgttgggaggccgaggcaggaggattactggaggccaggagtttgagaccagcctgggcaacatagcaagatctcatctctaaaaaaagaaagaaagaaacgaaaagaaaaatatgaacttgttaacaattctcattatctgagggaagaacgaggatggcaggggactctttaactaccaattttagtttgagctgcaatttccccctcatttagcattttcggttttattcaagaaaaaaaaaagacaaaaattagggttcaatatcataaaacatagagcaacccggagaaaagaattgcctattcacatctattcttttagctttcttacgttttaaccacttgagccgtaacggggtgtgaggggatttgcggtgatggaactgttctgtgttttggttacggggtggtcacgtgatgcgtgcatttgccaaaacctcagaactgcacctaaaaagggtgaattgtgctgtatgcaaattatgcctttatttaaaaatgctaactaattttttctcttttttctcatattaaggagaccgatttgacagcctttaaatcaaaatctctgtgtataaaactctcactaaaattatgtcaagaaatagacttggaaaaaaacttatattccctgcgacagaaatagcgtcaataatcttatcatgtaaaccacataaaaaaggaacaaagttggattccagtaggcaagtgggcaaaagacacggagagacgtttgcaaatcgtaaagagagggagtggccaaccatcatggcaggaagacgttcctgcacacaagaaatcaaaatccaaccccgtccatcaacaagcaggaaacaatctcacaggaatccccggggcggtgtggcaggccggcgcagcctctctcctgctcggttgtagggttgtcaggaccttctgggtgacagagacaagatcttttctttcttggggtccacttgtgggaatcgagaccaaagaaaaaatcctaggccaggcgcggtggctcacgcctgtaatcccagcactttgggaggccgaggcgggcagatcacgaggtcgggagatcgagaccatcctggctaacatggtgaaaccccgtctctactaaaaatacaaaacattagccgggtgtggcggtgggcgcctgtagtcccagctactcgggaggctgaggcaggagaatggtgtgaacccgggtggcggagcttgcagtgagccgagatcacgccactgcactccagcctgggcgacagagcgatactccgtctaaaaaaaaaaaaagaaagaaagaaagaaagaatcctaaacacggacaaaattttcatccccaaaggtgttatttacagcactatttttaatgcaaaacagttagggaggaaaaaacaacacttaaatttgccaagaactgattgggtaataatgccataaaccaccgtgaggtactatgatttaaaaaaaggttcagagccggcagagcagcggtggtgagtggctggtaggagatgaacataaagctgggggccgggcacggtggctcaggcctgtaatcccagcactttgcgaggctgaggtgggtggatcacctgaggtcaggagttcgagaccagcctggccaacatggcaaaaccccatctctaccataaatacaaaattatttgggtgtggttgtgcatgcctgtaatcccagctactttcgaggctgaagcaggagactcgcttgaacttgggaggcggaggttgcagtgagccgagatcgtgccattgcactccagcctggacgacaaaagagaaactccgtctcaaaaaaaaaaggatgaaatcttgtgctttgtggtaacatgcatgcggctggagaccattatcctcatggaattcacgcaggaacagaaaaccaaataccacatgttctcacttataagtgagagcttaacattgggtactcatgatgtaaagatggaaaaatgggcactggcgactgctagagaccggaaagggggaggcggcgagggttgaataaccaactgtaggggactacgctcagtacctgggtggtggggtcattcgtaacccaaacctcagtatcacgtaatatacccaggtcggccaggcgtggtggctgacgtctgtaatccaagcactttgggaggccgaggtgggcggatcacctgaggtaagaagtttgagaccagcctggactacgtggtgaaaccccgtctctactaaaaatacaaatatcagccgggcgaggtgttgtatgcctgtggtcccagctactcggcaggctgaggcaggataattacttgaaccccggaggcggaggttgcagtgagccgagattgcaccattgcattccagcctgggtgacggagcaagactctgtccactgcccccgccccacaaacatacatatataaatatataactattatatataaatatataatatatatctattaaatatataacatataatatttatatctataaatatatatgaatattatatataaatatataatatttatatctataaatatatatgaatattatatataatatataatatatatctattaaatatatataaatattatatataaatatataatatatatctattaaatatatataaatattatatataaatatataatatatctattaaatatatataaatgttatatataaatatataatatatatctatgaaatatataaatattatatataaatatataatatatatctattaaatatatataatatataatatttatatctataaatatataactattatatataaatatataatatatatctattatatataacattatatataatatttatgtctataaatatatataaacattatatatatattatatatctattaaatatatataactattatatataatattctatatctataaatatatataactattttatatatctctctctctctttctctctctccaggtccatgtaccccctgaatctaaaataaaaggagaaaaaaataccagaatggccaccaaaacaaagcaaaaaaggctgaatgttgtgtgcagcaggagaaatacatttagaatttcaccatgggaggaggtaatccccaaatccaggcagagcacagcctggggagaacaaccgtcatctcaccagctctccccggtgttgcccttagaaaaggaactggtttcattttttaaattattatttgtttttgagatggagtctcactgtgtcacccaggctggagtgcagtggcgcaatctcggctcactgcaacctccgcctcctgggttcaagtgattctcctgcctcagcctgtcgggtagctgggacgacaggtacccgccaccacacctggctaattttttgtatttttagtagagatggggttcaccatgttggccagggtagtctctaactcctgacctcaagtgatccgctggcctcagcctcccaaagtgctgagtcactgcgcccggccttcacatgcactctttaaagcaacaccaggttgacgtctacttgggtttcacaaactatgacccaccgcccaggccaaatctgacgcactgcctgttttggggcagtcggtgagctcatggttaagcaaaatcaaaagaaggataataatgttcacgacacacgaaaatgatgtgaagttcaaaattcagtgtccataaataaagttttattggcacaaagccctgcccactcctttacctgtttttcgtgaatcttccgtcatcccacaacagcagagccctcctacctcagcctcccaagtagctgggattacgggcatccgccaccacacctggctaattttttttttgtatttttagtagagacggggtttcaccatgttgtccaggctggttttgaactcctgacctcaaatgatctgcctgccttggcctcccaaggtgctaaaattacaggaatgagccaccatgcctggtaactgtatttctcttaaaggggtcctttcttttggaaattgatgctgaaatatttatttatttatttatttatttattgagacagagttacactctgttgcccaggttggagtgcagtggtgtaatctcaactcactgcaaacctctgcctcccgggttcaagcgattctcctgcctcagcctcctgagtagctggggctacaggtgtgtaccaccatgcccggctaatttttgtatttttagtaaagatggggtttcaccatgttggcaaggctggtcttgaactcctgacctcaagtgatccgcctgcctcggcctcaggtggatcacctgaggtcaggagtttgagacaagcctggccaatatggtgaaacctcgtctctactaaaaatacaaaaattagctgggcgagatgacacccacctgtaatcccaggtactcgggaggctgaggcaggagaatcgcttaaatctgggaggtggaggttgcagtgagccaagatcgcaccattgtgctccagcctgggcgagagagcgagactccaactcaaaaaataaaataaaataaaataagcattggattgcattttttaggctgtgtctttgtgataccttaccctgttttaaccggagtgactgtctcctagcagagagagctggacagactccattttggtttcttcacttggggccccccgtatcccccttaagggaataactagtgcaagctgacaccaagcacatccaggaatgcacctgctgataagatattgaggcagcctgtattagcagctcctgctcggtggaaggtacctaaaagcccctgcatttatctcttagtgatagtttaagcccctgcacctggaactgtttattttttgtaactgcttccataaccaattaattttttaactttttgcctgttctgcttctgtaaaactacttcagttaaactccccctcctctatttagaccatagtataaaagagaatctagccccttcttcgagatggagagaattctaagcgctagctgtctctcagtcgctggctaataaaggactccataatttgtctcaaagtgtggcatttctctctaactcgcttggttacaacatcttgtctttctggtgacacctgttgacatgatgtgccttagagtcagtgaaatgttactgctgaggccgcagcattctcccgagggaataaagccatgtgcagcataacgaggtttctgtcaatgacagactgcacgtccgacggtggccccaccgattataatggagctaagactgcaattgcccggtgatgttgtcgctgtcctaatggagtagctcaaggcgttactctaatgtttgtgccgatgctggtgtacacagacctacttgactgccagtcatagaaaagcatagcacatataattgtgtacagtacatcatacctgtcaatggcaacgggcaggacatggtggctcgcacctgtaatcccagcactttgggaggctgaagtagggcaatcgctcgaggccagaagttcgagaccagcccatgcaacatagtgagaccctgtctctacaaaaaagaaaaaaaagtcaataaacaactatgttactggtgtatatatttactatatataggtttctttgtttgttttttgagatggagtctcgttctgtcacccaggctggctcactgcaacctctgcctccccagttcaagtgattctcctgcctcagcctcctgagtagctgggattataggcatgcaccaccatgcccgaatactttttgtatttttagtagagatggggtttcactatgttggccaggctggtctcgaactcctgacctcaagtgatccacccactttggcctcccaaagtgctgggaaacaggtatgagccaccacggccggcctttattcaccgtactatagtttttattgttattttagagtgtactccttttacttataaagaaaagttaactgcttgagtctaagagttcgagaccagcctgggcaatatagtgagacttagtctctgcaaaaaagaaaaaaatgtaaaaattagcccagtgtggtggtgtgtgccttagttcccgctactcaggaggctgaggtgggaggatcgtttgagcctgagaggcataagctgcagtgagctgagactgtgccactgcattcccgcctgggtaacagagtgggaccttgcctcaaaaaaaaaaaaaaggaaagggaaaaattaactgtcaaaacagcctcaggcagctccttcagaaggtgtccagaaaaaagcactgttatcctaggagacgacagctccaagggtgttattgcccctgaagatcttccagtgggataagacgtggagatggaagacagtgacgttgatgatcctgaccctgcataggcctaggctgatgtgtgtgtgtttgtgtcttacattttttctttttctgagatggagtcttgctctgtcacccaggcaggagtgtaatggtgtgatctcggctcactgcaatctctgcctcctgggttgaagtgattcttttgccttagccttcccagtagctggaattacagcactttgggaggccgaggtggacggatcactggaggtcaggcgttttgagaccagcctggccaacatggtgaaaacccatctctactaaaaatacaaaaattatccaggtgtggtggtgcatgcctgtaatcccagctacttgggaggctgtggcagaagaatcgcttgaacctgggaggcggaggttgcagtgagttgagattgtgccattgcaaatcagtgtgggtgacagagtgggactccgtctcaaaaaataaatagatggtcgcatttgggctatggcctagacccctgtgctagatcatctggcacaggtgtgtagcagactctcccacctaggtttgtgtaagcacactctatgatatctatacaatgatgaaatcacctaaggatacatctctcagaatttattcctgatgttaatcgaagcaggactatagcagtattaataacgagacctaacaatgcttgagcacctactatgtgccaagaagttttttttgttttgttctgtttttgtttttgatgaatctcactctgttgcccaggctggagtgcagtagctcaatctcgaccggctgcaacctccacctctgaggttcaagcaattcgcctgcctcagcctccgaagtagctgggattacaggcacccaccctgatgtctggctaatttttgtatttttagtagagacagggtttcgccatgttggccaggctggtcttgaactccttgtctcaggtaatccacccgccttggcctcccaaagtgctgggatcacaggcgtgagccaccgagcccggccgcaagaagttttaagtgttttgtatctcttaacaaatttcattagcacaaagagggcagaggagaattggaatggccttgcggaaagacctccctggcacccgcctcctccttatgccccaagcctgcagcccctggggcctattattagggcccacatctggtgacatttcccggactgatagcgatctctgaagctcttgctcaaggttctttcctggacgtttatctgctccaaaactcacagctagcttcctgccatcagccccctacctttaacgtgggctcaaggctggcggccacctgggactgacgacagagacagaaagagccccctcaccttgcctcaccctcagacacagcacaaggtgacgggaccgggattcgttgcggggtgtgtctcagggagccaggaggtaggagcttggggattaggagagttgaagggcactctccagggtatacaaaaaggaggtagtgggctgggcacagtggctcacccctgtaatcctagcacttagggaggccgaggcaggtggatcacctgaggtcaagagttggagaccaccctggccaacatagtgaatccccatctctactaaaaatacaaaaaccagccgggtgtggtggcagctgcctgtaatcccagctacttaggaggctgaggcaggagaattgcttgaacccaggagacagaggttgcagtgagctgagatcgtgccattgcactccggcctaggcaatagagtgagactccatctcaaaagaaaaaaaaaaaaagaggtggcaaaaaggggctgaaagttctgggccacctcctctgggtgaggaatgttctcatgccatatgcgtgaactgtgcctggtcagaggtatttgactgtcttcatcactgcggtacccccagcgcttaggatagtgtctggtgtacaatttgggctcaatgcataattttacactaaatgaatgaatccatcctcagatgacaaaggagagattgccctccttaatggatcactcatcgattatttaccaagtgcctgctgtgttccaggggccaggagcaagccacacaccagcctcgcctctagggaactcagagatgaataatgcagatgggtgatcaccaaatgatccaacaaacgcggtctaattgctgctgcctgtaaccagctctttttttgtgggggctcggggggaacggggggacaacagagtcttgctctatcacccaggctggagtgcagtggcatgatcacagttctctccaaactccgcctcccgggttcaagcgattctcctgcctcagcctcccaagtagctgagattacaggcatgcaccaccacacccagctaatttttgtatctttagtagagatgggggtctcaccatgttggccaggctggtctcaaactcctgacctcatgcgatcctcccaccttagcttcccaaagtactggtattacaggtgtgagccaccgttcccagcctgtaatcatctcttcatgggagagaagctcctataggagggtctgattgaaaagggcaggaaaaactttggggagaaagtgaaatttgcactgagatcgcaggaatgagttaaaaaaaaaaaaaagcagaggaaagaaaaggtgttccaggcagaggggcagcacatgcaaaggccctggggtgggagggagatgagaatcttggcaatggacacaaaggtagggaagccgggatttggtgcacaaagagggggaaggtgcaagagaagtctggagaggctggcaggtgccccagctctcaccagtggtgccggggagactcatatttatcccacaagcaatgaagagccacagtgtaattttccagtttgaactgtattttttttttttttgagacagggtctcactctgttgcccaggctggagtgcagtggcacagtcatggttcactgcagcctcaatctcctgagctcaagtgatcctcgtgcctcagcctctcgggtagctggaattacaatgcaagccacactgtttggccaatttatttttattttgtagagacagggtttcgccttgccacctagactggtcctgaagccctggcctcaagtgattctcctgcctgggtctcccacagcgctggggttacaaggtttgggctttcaaaggatcactctagctgtagggtggtgagtggctggtaggagatgaatataaagctgagggccaggcacagtggcgcacacctgtactcccagcactttgggaggccgaggtgcatgaatcacctgaggtcaggagttcaagaccagcctggtcaatatggtgaaaccccgtctctactaaaaatataaaaattagctgggcatgtccccagggtgtgtgcctatagtcccaactactctactcaggaggctgaagcaggagaattgcttgaacccgagaggcagaggttgcagtgagccaagattgtaccactgcactccagcttaggcaacacagtgagatcctgtctcaaaaaaaaaaaaaaatgctggggcgctgtgtgcttggatgatagggctgtggagacaggacatagtggacagaggcaagaggctttttggaggcaaaatcgacagggctttgtgatgaattgggtgtgcgtgttgggggagtaggagacagaggtattcaaggattctacacctctatctcagacgagcatactgaggctcagggtggggatggggggcagaaagctctgaacccaggatcacacagtcataatccagcatctcaactagagcttcgacctatgcctgtctgctgtgtaagctcaagctttcctcaaccccagacctctcttctctgcctgcacctcaccctcggaggtcattttcaggttcaaagacataaatagtatctaaattatttttgtatttttttgtagagacaaggaaggtcttgtcatgttgtccaggctgacctggaactcctggacccacacaatcttcccgcctctgtctcccaaagtgctgggactagaaaagtgagccactgtgccctgctggcatctaaattctgactcccacatgcccgtacccagccaggaacccctctgtaatttttttgttttaattttgagacagagcctcactttgtcacccagactggagtgctgtggtgtgatcttgcctcactgtaacccccatctcctgggttcaagcgattcccctgcctcagcctcccgagtagctaggattacaggcacctgcaaccacacccatctaatttttgtatttttagtagagatggggttttgccatgttggccaggctggtctcaaactcctgacctcaggtgatccgcccacctcggccttccaaagtgctgggattacaggcgtgagccactgtgctgggccccctcctgtaatcttgctgccggtatccagctgcctaagtgaactttccccgggatgtcttacaggcatttcaaaggcgaagtgaccaacccggagctcctggtcttaccccaaacctgagctcctggtcttaccccaaacctgctctcctgcagtctcccccatcccagtgcacagcaactccagcttccatcggttcaaaagtcctgcagtcaccccgacactgctctccctctcacctcacacatccagcccagcagcaaatctagccagctccaccttgaccctggaatctgcttcccaccccctcctctgacatcaccctggtccccatccccatcactgcccacctgggttactgcagcagcttcctcccggcctcctgcttccatcccaccccctcagtctagtctcaaccttaaagtcacagtgattgttaagacctaagtcagatattgttccttctctgctcaacagtctcttgtaactcccatctcactcacaggaaaggccaggagagtctgcactatgactcacagggtcctgctccatctgtccgcttccctctctgccttcacgtctcacctctcttcccattgcccacgtggctccagccacaccggcctccctgctgttccttgagcattccaggcaccgtcctgcctcaggacctttgcacaagctgctggttctgcctgaagggctcttcctccagatacgtatgtgcctcactttgtcatttcctccaaaactttgctcaaatgttatattctttttttttttttttgtaatagtctctccctgtctcccatgctgtagtgcaatggcgtgatctcggctcactgcaacctctgcctcccgggttaaagtgattctcctgccctaacctcccgagtagctgggattacatgtgtgtgctaccacgcccagctaatttttttgtgtttttagtagagacggggtttcaccacgttggccaggatggtcttgaacccttaatctcaggtgatcctcccgccttggcatcccaaagtgttgagattacaggcatgagccaccgagcctggccaaatgttatattcttattgaggtcttccctgacaaccccgtttaatgtaccagtgtcccctttctgctttccgtcttgtccctcacattctcaattctccttaacttgattttttttttttttttttggagatggagtctcactctgtcgccgaggctggagtgcagtggcctgatctcggctccctgcaacctccaacctcccaggttcaagtgattctcagcctcccgaatacctgggattacaggtgtgcaccaccatgcctggctaatttttgtatttttagtagagacagggtttcgccctgttgagcaggctggtctcgaactcctgacctcaggtgatctgcctgccttgacctcccaaagtgttggggttacaggcgtgagccactgcacccggccaaaaaatttttaattatttattttttatagagactgggtctcactatgttggccaccttggactggaactcctgacttcatccagtccttctgcttcagcctcacaaagtgctgtgattacaggcatgaccctccacacctggccccctccactttacttattatttttccataacacttggcaatcttctaaagcagtatatcatgaattaatttattatatgtattatacctgacatctcccactgggatgtaagttccacgagggcttgttttgttacatgagttatctctggtacttagagcaatattattgtgtccagtgagccgagatcgtgccattgcactgcagcctgggtgacacagcaagactgtgtctcaaaaaaaaaaaaaaaaagaaagaaagaaagaaaaaagaacagtattattgggtcataaaaagcattcaggctgtgctcaatgtctcacacttgtaatcccagcactctgggaggccaaggtgggaggatcacttgaagccaatagttgaagagtagcctgggcaacacagcaagaccccatctctacagaaaagaaaactaaggctaggcacagtggctcacacctgcaatcctagcattttggaggctgaggtgggtggatcatgaggtcaggagttggagaccagcctggccaaaatcataaaaccccgtctctactaaaaacacaaaaattagccaggcgtggtggcgtgtgcatgtagttccagctacttgggaggctgaggcgggagaattgcttgaacctggtaggtggaggttgcagtgagccgagatcaggccactgcactccagcctgggagacagagcaagactgcatctcaaaaaaaataaataaataaaaaaaattaaaaaaattagccaggcatggtggtaagtgcctgtagtcccagctactccaggaagctgaggtgggaggatctcttgagcctaggaagtggaggctgcagtgatctatgattgtaccattgcactccagcctgggtgacagaatgtgaccctgtctcaaaaagaataataataataatcattccataaaaagtatcaaatggagaaataaatcatcagtggggtctcggaggggaccaggggctgcagtgacaggcaacctggggccctgacacagggtcattcctgttccaggaagatgaatgcttccagatgcctgtctgaggaagtggggtccctccgccctctaaccatggctgtcctgtctgcctcctttgtcgtcggagtgctgggcaatgggctggtgccgtgggtgactgtcttccgcatggcccgcacagtctccaccgtctgcttcttccacctggcccttgccgatttcatgctctcactgtctctgcccatcctcgtgtactatattgtctccaggcagtggctccttggagagtgggcctgcaaactctacaccggttttgtgttcctcaccttctccaccagtaactgcctcctggtcctcatctctgtggaccgttgcatctctgtcctctaccccgtctgggccctgaaccaccgcactgagcagagggcgagctggctggccttcggggtgtggctcctggccgccgccttgtgctctgcgcacctgaaattccggacaaccagaaaatggaatggctgtatgcagtgctacttacagttcaacttggagaatgagactgcccagatgtggactcaggaggtctttgggagacaaatggcggtgatcatggcccacttcctgctgggcttcctggggcccttagcaatcataggcacctgcgcccacctcatccgggccaagctcttgcgggagggctgggtccatgccaaccggcccaagaggctgctgctggtgctggtgagcgctttatctgctggttcccatttaacgtgatgctgttggtccatctgtggcgacgggtgatgctcaaggaattctaccacccccagatgctgctcatcctccaggctagctttgccttgggctgtgtcaacaactgcctcaacccgttcctctacgtcttcgttggcagagatttccaagaaaagtttttccagtctttgacttctgccctggcgagggcgtttggagaggaggagtttctgtcatcccgtccccgtggcaacgccccccgggaatgatggaagacttcagctggaagctggaagccgtccttcttagtttgcttgtggcctcttaccttgactggcttctaaaaccctgccaaatcctgcctcttctttcaggaagtcttccggcaacccctcatctaaagctctgtggtagagacagctacttactccccagtgtccattcttccctttctttttatctttttccttttttattttttggagacagagtcttattttgtcacccaggctggagcgcagtggcacagtcttggctcactgcagccttgacctccagggctcaagccatcctcctgcctcagcacccccgccccccacccccaaatagctgggactacaggcatgtgccaccaagcctggctaatttgtagagatggggtttcatcattttgcccaggatggtctcaagctcctgagttcaaatgatcctccagccttggccccccaaaatgctgggattacaggtgtgagccacagcgcctggcctcccctttgcttgtagtaagactcctgtttgtttcaaacgaggcacatgcttaactagaaaagaaaaaaaagactacatttcccagaatcctttgcatgtcgtacagccatgtgactgcttctggccaataaaatgtaagtggcagcaatcaatgtaacttccttgaagagccattaaatggaagaggcctgtcctccatttccccatctccccctttctattgtccagaatgcaggcataccagttagctcttgttgcgcaacaaacaccatcaaagtttagaggcttaaaaacataaccattttttttatagtgtcttgttctgttgcccaggttggagtgcagtggtgtgatcatagctcaccaccacctcaatctcccaggctcaagtagtcctctcacttcagcctcctgagtagctgggattacaggcataccccactgtgcccagctaatttttttttttttttcttgagacggaatctcactttgttgcccaggctggagtgcagtggcgccatctcagctcactgcaagctccgcctcccgggttcacgccattctcctgcctcagcctcccgagtagctgggactacaggcgcccgccaccatgcccggctaattttttgcattttttttagtagagacggggtttcaccatgttagccaggatggtctgtatctcctgacctcgtgatctgcccgcctcagcctcccaaaatgctgggattacaggcgtgagccactgcgcccagcccacctggctaatttttttaaaaaagtttttgtagagatggagtcttgctatgttgcccaggctggtctcaaactcctggcctcaagcaatcctcctgcctcagcctcccaaagtgttgggattatagacgtgagccaccacacctggcttcataaccttttatgatttctgtggatcagcagtttgggctgggctcagctcagtagttttctcatcttgcgtctgggtttctttatgcatctgtgggtcacctaagtgattctgcttctgggagagtggctggcttggggtgatgggattggctaatccacatagctcttatcatcctgcaggctggctttttcgtttgatggttggggagggttccaagagtaaggaaagtatgaggcggaggctcagaactttgcacaaggtgactagcactcaagctactggtcaaaaagcaagtcacgagcctggcttagattcgaggtgtgaggaaaggactccaccccttgatgggaaaatctaaagagtgacattgctaaggagcacgtatgcaggaaggtgtgcagaacgggggccatttgtgtaatctgccacagcagccctgatgcaaagctaccgtgtacccagggagtccctaggccagccctgagatgcttacacccaggttgtgaaaggggaggtttcaaattccagctcattgaagccactgttattttgtgtctctcctgcaacagctgaatctaccccttaactattaattatgctgccaaactctggaacttgtgtaaagtgacttaataaatttccttattgttgaagccagttggagtcaggttttctgttacttaaaacccccccaaaaaaacaaactggtgcatgtgaagaatagtcctttctggggattgaagtcccagtggtccctggtcacaacaggccattcccttggctcttaagtcgaggcaaaagaaaaatgtcatgcaatccagaagctgtcacaccacttgctcatgattcaaagaagtaaatctgcccaggtggggtggctcatgcctgtaatttcatcactttgggaggctgaagtaggcggatcacttgaggtcaggagtttgagaccagtctggccaacatggtgaaaccccttctctatgaaacatacaaaaattagccagacgtggtggcaggcacctgtagtctcagctactccagagacagaggaaggagaatcgcttgaacctgggagacagacgttgcagtgagccaagagctcgtcactgtactgcaggttgggtgacagagactctttctcaaaaaaaaaaaaaaaaaaaaaaagcatctatgacttgccatgagaactccacctctcagagactcatttgcccccaaatctataaaataggaacaaatgtttccatcttctggatgaggagaggattaaatgacacagtgactgagtgccaggaagcacagagtcaccttaaaaaaaattaactcctgggccgggcagggtgactcaagcctgtaatcccagcactttgggaggccaaggtgggcggatcacctgaggtcgggagttcgagaccagcctgaccaatatggagaaaccccatctctactaaaaatacaaaattagccgggcgtggtggcacatgcctgtaatcccagctactcgggaggctgaggcaggagaattgcttgaacccaggaggcggaggttgcagtgaggcgaggtcgcaccattgctctccagcctgggtgacagagcaagactccgactcaaaaaagaaaaataaaaagaaaattaaaaaagcattggattgtattttttaggcggtgtcttgtctttctggtgacacctgttgacatgatgtgtcttagagtcagtgaaatgttacccgtgaggccacagtattctcctgaggaaataaagccatgcacagcataacgaggtttctgtcaatgacagactgcacgtccgacagcggccccaccgattataatggagctgaaagactgcagttgcccggtgatgttgtagctgtcctaatggagtagctcaaggcgttactctaatgtttgtgctgatgctggtgtacacagacctacttgaccgccagtcgtataaaagcatagcacatacaactgtgtacagtacgtcatactagtccatggcaacaggcaggacatggtggctcacagttataatcccagcactttgggaggccgaggagggtggatcatgaggtcaggagatcgagaccatcctggctaacacggtgaaaccccatctttactaaaaattacaaaaaattagccgggcatggtggcgggcgcctgtagtctcagctactccggaggctgaggcaggagaatagcatgaatccgggaggcggagcttgcagtgagccaagatcgcgccactgcactccagcctgggtgacagagcgagactccatctcaaaaacaaaaagtaataataataataatgagagcagtattaacaatagagagctaacaatgcctgagcgcctactatgtgccaagaagttttttttgttttgttctgtgtttgctttgtttttgtttttgattattctcactgtcgcccaggctggagtgcggtagctcaatctcgactcgctgcaacctccgcttctcagatttaagcgattctcctgcctcagcctcccaagtagctgggattacaggcacccaccctgatgtctggctaatttttgtatttttagtagagacagggtttcgccatgttggccaggctggtcttgaactccttgtctcaggtaatccacccgccttggcctcccaaagtgctgggatcacaggcgtgagccaccgagcccggccgcaagaagttttaagtgttttgtatctcttaacaaatttcattagcacaaggagggcagaggagaattggaatggccttgcggaaagacctccctgtcacccgcctcctccttatgccccaagcctgcagcccctggggcctattattagggcccacatctggtgacatttcccggactgatagcgatctctgaagctcttgctcaaggttctttcctggacatttatctgctccaaaactcacagctagcttcctgccatcagccccctacctttaacgtgggctcaaggctggcggttgcctgggactgacgacggagcagagaaagccccctcatcttgctttcatcctcggacacagcacaaggtgacaggggactgggatttgttgggaggatctcagggagccaggaggtaggagcttggggactaagagagttgaagggcactttccagggtatacaaaaaggagctggcgggctgggtgcggccgctcatccctgaaatcccagcagtttgggaggctgaggcaggtggatcacctgaggtcaagagttggagaccagcctggccaacatggtgaaaccccgtctttactaaaaatacaaaaattagctgggtatggtggcaggtgcctgtactctcaattactcaggaggctgaggcaggagaatcgcttgaacctgggaggcggaggttgcagtgagctgagattgtgccactgcactccagcctaggcaatagagtgagactctgtctcaaaacaaaacaaaacaaaacaaaaagaggtggcaaaaaggggctgaaagttctgggccacctcctctgggtgaggaatgttctcatgccatatgcgtgaactgtgcctgatcagaggtatttgactgtcttcatcactgcggtatccccagcgcttaggatagtgtatggcgtacgatttgggctcaatgcataattttacactaaatgaatgaatccatcctcagatgacaaaggagagattgtcctccttaatgatcactcatccattatttaccaagtgcctgctgtgttccaggggccaggagcaagccacacaccagcctcgcctctagggaacccagagatgaataatgcagatgggtgatcaccaaatgaccaaacaaacggtctaattgctgctgcctgtaactagctctttttttttttttttttttggttgaggggagatcagagtcttgctctgtcacccaggctggagtgcagtggcacgatcatggctcactccaacctctgcctcccgggttcaagcaatatctcctgcctcagcctcccaagtagctgggattacaggcgtgtgccaccttacccggctaatttttgtatttttagtagagacaggatttcaccatgttggccaggctggtcttgaactcctgacctcaggcgatcctcccacctcagcctcccaaagtcctgggattacaggcgtgacccaccatgcccagcctgtaaccatgtcttcataggagagaaggtcctataggagggcctgattcatcaaggtggctgggaaaagctttggggagaaagtgaaatttgcactgagatctcaggaaggagttaaaaaaaaaaaaaaagcagaggaaagaaagggtgctccaggcagaggggcagcacatgcaaaggccctgggtgggagggagacgagaatcttggcaatggacacaaaggtagggaagccgggatttggtgcacaaagagggggaaggtgcaagagaagtctggagaggccagcaggtgccccagccctcaccagcggtgtcggggagactcatatttatcccacaagcaatgaagagccacagtgtaattttccagtttgaactgtatttttttttttttgagacagggtctcactctgttgcccaggctggagtgcagtggcacagtcatggctcactgcagcctcgacctcctgagctcaagtgatcctcatgcctcagcctcctgggtagctggaactacaatgcaagccaccctgtttagctaatttatttttattttgtagagacagggtttcgccttgccgcctagactggtcttgaagccctggcctcaagtaattctcctgcttgggtctcccacagcgctggggttacaaggtttgggctttcaaagcatcactctggctgtagggtggtgagtggctggtaggagataaatataaagctggagtccaggcacggtggctcacgcctgtactccccacactttgggaggccgaggtgcgtgaatcacccgaggtcaggagttcaagaccagcctggccaacatggtgaaaccccgtcgctactaaaaatacaaaaaatagccaggcgtgtccctggggtgcgtctcaactatactacttaggaggctgaggcaggagaattgcttgaatccgagaggcagaggttgcagtgaaccaagattgtaccactgcactccagctcgggcaacagagcgagatcctgtctcaaaaaaaaaaaaaaaaaaaagctggggccctgtgtgcttgggtgatagggctatggagacaggacatagtggacagaggcaagaggctttttggaggcaaaattgacagggctttttgatgaattgggtgtgcgtgttgagggagtaggagagagaggtattcaaggattctacacccctatctcagatgagcatagtgaggctcggggtgcaggggaagccctgagcccaagatcacacagtcataatccagtgtctcaactagagcttcgacttatgcctgtctgctgtgtaagctcaagctttcctcaaccccagacctctcttctctgtctgcacctcacccttggaggacattctcaggctcaaagacgtaaatagcatctaaatgttttttgtttttttttttgtagaggcaaggtcatgttgtgttgcccaggctcacgcaatcttcctgcctctgcctcccaaagtgctgggactacagaggtgagccactgtgcccggctggcatctaaattctaacgacttcgacatgcccgtatccagccagaaacccctctgtaatttttttttttttgagtcttactccgtgacctaggctggagggcagtggcgccatcttgcctcattgcaacctccatctcctgggttcaacgaattctcctgcctcagcctcccgagtagctgggattacagccacgtgccaccacacccagctaatttttgtatttttagtagagacggggttttgccatgttggccaggctggtctcaaactcctgacctcaggtgatccacccgcctcggccttccaataagtgctgggattacaggcgtgagccaccatgccgggtcccctcctgtaatcttgctgctggtatccagctgccttagtgaagtttccccgggatgccttacaggcatttcaaaggcgaagtgaccaaccccgagctcctggtcttaccccaaacctgctctcctgccgtctcccctatcccagtgcacagcaactccagcttccatcggttcaaaagtcctgcagtcaccccgacactgctctccctctcacctcacacatccagcccagcagcaaatctagccagctccaccttgaccctggaatctgcttcccaccccctcctctgacatcaccctggtccccatccccatcactgcccacctgggttactgcagcagcttcctcccggcctcctgcttccatcccaccccctcagtctagtctcaaccttaaagtcacagtgattgttaagacctaagtcagatattgttccttctctgctcaacagtctcttgtaactcccatctcactcacaggaaaggccaggagagtctgcactatgactcacagggtcctgctccatctgcccgcttccctctctgccttcacctcttacctctcttcccattgcccacgtggctccagccacaccggcctccctgctgttccttgagcattccaggcaccgtcctgcctcaggactttgcacaagctgctggttctgcctgaagggctcttcctccagatacgtatgtgcctcactactttgttatctcctccaaatctttgctcaaatgttatattctttttttttttttttgacatggagtctcaccctgttgcctaggctcgagtgcaatggtgtgatctcggctcactgcaacctctgcctcccaggttcaagtgattctcctgccccagccctctgagtagctgggattacaggtgggagcctccacgcccagctaattctttgtatctttagtagagacggggtttcaccatgttggccaggctggtctcgaactcctgacctcgtgatccgcacctctcagcctcccaaagtgctgggattacaggcatgagccactgagcatggacaaatgttacattcttatcggggtcttccctgaccaccctgtttaatgtaccagtggcccctttctgtctcatccttcacattcccagttgtccttatcttgattttttttttttttttttttttttggtgacagagactcactctgtcacccaggctggagtgcagtggcctgatctcggctcaccacaacctccagcttcccagattcaagcgattctcctgcctcagcctcccaaatgcctgcgatcacaggtgtgtgccaccgcacctggctaatttttttatttttattagtgacggggttttgccttgttggccaggctggtctcgaactcctgacttcaagtgatctgctcacctcggcctcccagtgtgctgggattacggatgtgaaccactgcgcttggccttaccttgatctttttctaaagaaaacatttcatgatcttcatttcttcctgtcaatatgtgtcaccatgtgatattaactcctttcagcctagaggacttacttccttaagcaattcctgcggtctgtaggccatatattatttcagatctggcttatctgaaaatgcccttttttcactttcatttttgaaagatattttcacagaatataaaattctggattgacagacttttctgctgccaattttttcaaatagtggagtaatttttaatattttgtccagattttaattttttttttgtctgtggcaccatttgtctgacaaagttactctgacattatccaaagttaaaagaacctccatctcattatttttactttatttttattgagacagggtctcgctttatcacccaggctgaagtgaaatggcgtgaccatggctcattgcagcctcgaattccagggctcaagtgaccctcgtgtctcagtctcccaatttgctgggactacaggcacgtgccaccatacctgactaattttttttttttttttttttgagacagagtcttgctctgttgcctgggctggaatgaagtggcacgatcttggctcactgcagcccctgcctcccaggttcaagggactctcctgcctcagccttcagagtagctgggattacaggcacgcaccaccaagcctggctaatttttgtatttttagtagagacaggcttttgccatgttggccaggctggtctcgaactcctgaacttaagtgatccaccagcctcagcctcccaaagtgctgggattacaggaatgagccactacgcccatctcacggctaatttttaaattttattttatttttatttttttgagacggagtttcgctctcgttacccaggctggagtgcagtggcgcgatcttgattcactgcaacctccgcctcccaagtttaagtgattcttcagcctcatgagtagctgggattacaggtggctgccaccacacccagctaatgttttttgtatttttagtagagacggggtttcgccatgctgggcaggctgatctcgaactcctgacctcaggtgatccgcctacctcagcctcccaaagtgctgggattacaggcgtgagccactgtgcatggccacaaaaacttgtaattatttattttttgtagagacggtctcactatgttgcccaccttggtttggaactcctggcttcaagcaatccttctgcctcagcctcccaaagtgttgtgattacaagcatgagccaccacacctggcccctccatttcatttattatttttccataacacttgtagtcttctaaagcagtatatcatgaagtaaatttattatatgtattacacctgacatctctcactgggatgtaagttccatgagggcttgttttgttacacgagttatgtccagtacttagaacaatattatagtgtccagtgagccgagatcgtgccattgcactgcagcctgggtgacataaggagactctgtctcaaaaaaaaaaaaaaaaaaagaacaatattattgtgtcataaaaagcattcaggctgggctcaatggctcacacttgtaatcccagcactttgggaggctgaggtgggaggatcacttgaagccaggagttcaagaccagcctgggcaacacagcaaaaccccatctctacaaaaaagaatttaaggcctggcagagtggctcacacctataatcccagcactttgggaggctggtggacgggtcacgaggtcagtagttcaagaccagcctggccaacatggtaaaaccctgtctctactaaaaacagaaaaattagccaggtgtggtggcatgtgcctgtagttccagctacttgggaggctgaggcaggaaaattgcttgaaccttggaggtggaggttgcagtgagccgagatcataccattgcactacagcctgggtgacagagagagcaagactctgtgtcaaaaaaaaaaaaaaaaaaaaaaggtaaaaaaattagccaggcatggtggtaagtgcctgtagtcccagctactccaggaggctgaggggggaggatctcttgagcctaggaggtggaggctgcagtgatctgtgattgtacctttgcactccagcctgggtgacagagcatgacgctgtctctaaaagaataataataataagcattccataaaaattatggaatggagaaatcatgaatggggtctcggaggggaccagaggctgcagtgacaggcaacctggggtcctgacacgtgatcgctcttgttccaggaagatgaactcttccggatgcctgtctgaggaggtggggtccctccgcccactgactgtggttatcctgtctgcgtccattgtcgtcggagtgctgggcaatgggctggtgctgtggatgactgtcttccgtatggcacgcacggtctccaccgtctgcttcttccacctggcccttgccgatttcatgctctcactgtctctgcccattgccatgtactatattgtctccaggcagtggctcctcggagagtgggcctgcaaactctacatcacctttgtgttcctcagctactttgccagtaactgcctccttgtcttcatctctgtggaccgttgcatctctgtcctctaccccgtctgggccctgaaccaccgcactgtgcagcgggcgagctggctggcctttggggtgtggctcctggccgccgccttgtgctctgcgcacctgaaattccggacaaccagaaaatggaatggctgtacgcactgctacttggcgttcaactctgacaatgagactgcccagatttggattgaaggggtcgtggagggacacattatagggaccattggccacttcctgctgggcttcctggggcccttagcaatcataggcacctgcgcccacctcatccgggccaagctcttgcgggagggctgggtccatgccaaccggcccaagaggctgctgctggtgctggtgagcgctttctttatcttctggtccccgtttaacgtggtgctgttggtccatctgtggcgacgggtgatgctcaaggaaatctaccacccccggatgctgctcatcctccaggctagctttgccttgggctgtgtcaacagcagcctcaaccccttcctctacgtcttcgttggcagagatttccaagaaaagtttttccagtctttgacttctgccctggcgagggcgtttggagaggaggagtttctgtcatcctgtccccgtggcaacgccccccgggaatgatggaagacttcagctggaagctggaagccgtccttcttagtttgcttgtggcctcttaccttgactggcttctaaaaccctgccaaatcctgcctcttctttcaggaagtcttccagcaacccctcatctaaagctctgtggtagagacagctacttactccccagtgtccattcttccccgcccccccccccttttttttttgagatagagtcttgctctgtcaccaggctggactgcagtggcgcgatctcggctcactgcaacctctgactttctggttcaagcaattctgcctcagcctcccgagtagctgggattacaggcacgtgccaccacgcccagataatttttgtatattttttagtagagacggggtttaaccacgttggccaggatggtctcaatctcctgaccttgtgatccgcctgcctcggcctcccaaagggctaggattacaggcgtgagccactgcacctggcccattctttccctctctttttcttttttttaaaaattttttaaagacagggtctgattttgtcacccaggctggagcgcagtggcaaaatctcggctcactgcagccttgaccttcagggctcaagccattctcctgcctcaggactccccacgccccaccccccacctcccctcaccctgcctagtacctgggactataggcatgtgctacctgggtaatttgtagacacggggtttcatcatgttgcccagagtggtctcaaactcctgagttcaagtgatcctccagcctcggctcccaaaactactgggattacaggtgtgagccacagcacctggcctccccttttttggtagtaaaactcctgtgttctaatgaggcacggtgcttaactagaaaaaaggaaagactacatttcccagtatcctttgcatgtaggtacaaccatgtgactgctttctgaccaataggatgtaagaggcagcaatcaatgtaacttccttcaagggccccttaaatggaaggggtctgccctccatttccccatttccccctttctattgtccggaatgcagatgtatcagttaccttttgctgtgtaacaaaaaccttccatgtttagaggcttaaaaatataagttttttttttttttctgatagggtcttgctctgttgctcaggctggagtgcagtggtgtgatcacaactcactgccacctcaatctcccaggctcaagtggtcctctcacctcagcctcctgagtagctggcatgtgccaccccatgccaggctaattttgtattttcagtagagatggggtttctccatgttggccaggccggtctcaaaatcctgaccttgaatgatctgcccgcttcagcctcccaaagtgctggaattacaggcatgagccaccacacctgggcagaactacttctttgaatcatgagcaagtggtgtgacagcttctggattgcatgacatttttcttttgcctcgacctagagccaagggaatggcctgttgtgaccagggaccactgggacttcaatccccagaaaggactattctttacatgcatcagtttggttttggggtgttttaagtaacagaaaacctgactccaactggcttcaacaataaggaaatttatcaagtcacttcacacaagttccagaggttggcagcataattaatagttaaggggtagattcagctgttgcaggagagacacaaaataacagtggcttcaatgagctgggatttgaaacctcccctttcacaacctgggtgtaagcatctcagggctggcctagggactcccgggggacacggtagctttgcatcagggctgctgtggcagattacacaaatggcccccgttctgcataccttcctgcatgcgtgctccttagcaatgtcactctttagattttcccatcaaggggtggagtcctttcctcacaccttgaatctaagccaggctcgtgacttgctttttgaccagtagcttgagtgctagtcaccttgtgcagagttctgagcctccccctcatactttccttactcttggaaccctccccaaccatcacacgaaaaagccagcctgcaggatgataagagctatgtctctagtaaacatacaaaaattagccgggcatggtggcagacacctgtaatcccagctacttgggagactgaggcaggagaatcgcttgaacctgggagacagaggttgcagtgaggcaagatctcatcactgcactccaggctgtgtgactgagactctgtctcaaaaaaaaaaaaaaaaagaaagaaagaaaaagaaaataaaagaaatgtaaaagaaaaaaaaaaaaagcagcagctctgacttgccctgagaactccacctctcagagcctcggttgccccaagtctataaaatagaagcaagtgtttccatcttctggatgaggagattaaatgacacagtgactgagtgccaggaaacacagacgcaccttaaaaaaattaactcctgtgggaggctgagcggggaggattgcttgagcccaggaattcgagaccagcctgggcaacatgatgacaccccatctgtacaagagattggcatggtgacgcatgcctgtagtactggctacgtgggagtctgagataggaggatcacttaagcctgggctgtggaggttgcaatgagctgagatcgtgccactgcactccagcctgggtgacacagtgagtctctctctctaactctctctctctctctctgtcacacacacacacacacacagaaagagagagagagagagagagagagagagacctacctattctgttgactagtggatctgattaaaaataaataaactggggaaagtattatttaaaaaaaaaaacttgaaagtgatgagaaatagtcctccctttcattccaaatcctccattgttactttttctcacgagaaaactgttaccagttttttgtgtatccaacccatgcataagcactttctttctttctttttttttttttttttttttgagacagagtctttctctgttgcctaggctggagtgcagcagtgagatctcggctcaccgcagcctccgcctcccggggttcaagtgattctcctgcctcagcctcccgagtagctgggattacagacacccaccatcatgtccagctaacttttgtatttttgtagagacagggtttcaccatgttgaccaggctggtcttgaactcctgacctcaggtggtctgcccgccttggcttcccaaagtgcctgggattataggcgtgagccaccgctcccagtgcataagcactttcaacacaaatagagcatgccatagctatgattctacatcgtgagtattttccaaagagtatacctttgggacggcaatacataagatatctagcacatgacttttcaatggtggtggctaagtattcccttatatgtatatactgtgcacggaagtagtgttccctaatcccctactgatgagttgctttgaatttgatgcaatgatatttttgaaactttgaaaattattcaataaaacacacattctgaacaatacataaagaaaatagaatggggggaatttgtttgatttatcactaagtgaacaaccaggcaacccagccataaaacaatgtggccaccccagggctcccctcccacctcctcgccctctcagtcagtcctccatctcctttaaagataacttttgttttgttttgttttgttttgttttctgagatggagtctccctctgtcattcaggcaggagtgtagtggtgcgatctcagctcactgcaacctccgcctcccgggttcaagtgattctcctgcctcagcctccctagtagctgggattacaggcatgtgccacctcatctggctaattttttttttttttgtatttttagtagagatggggtttctctatgctggccaggctggtctcaaactcttggcctcaggtgatccacccgcctcggcctcccaaagtgctgggattacaggcgtgagtctccccaccctggccaatatatttcaattaaatatatcaatgctgatatttgtccatcctcacattttgtcggtctctctctccatctgtccacgcactgtagtacctccagtatgatgagcagacaagacggggacatgaggtctgggaaacccagggagggagccctcagcatacccactgtgctgcaaggggcacaatgctcagaggtacctcccaaaaatgttgaactgtgttaaagtcggcgcaggtaggacgtcacgatattttacctattaattcttcagcctgtatcttctaagaacaagagcattttccctgtaaaattataatattattatctccctcaagaactttaccattggtattatctaataaacaggccatattcaaatttcctaactgttccaataataaactttagagcaatttttttttttgagtcaggttcttgctttgttgaccaggcgggagtagagtggcatggtcatagctccctgcagcctcgagcaatcctcctgcctcagcctcccaagtagctgggacgacaggcatgtgccatcatgccctcattaaatttttttttgtagagacagaatcttgctatgttgcccaggctggtcttgaattcctggcctcaagcaatctttctgcttcagcctcccgaagtgttgagattacatgtgtgagccgctgcccttggcatggagcattttttaaaaagcaggatcctgcaatgatattctctgcctctccttgaaaaaaaaaaaaaaaaaaaagactatgcattaggtcacaaataaaacataggttgattccccaaagcagaggtaatacaggccatattcaaatttagaaattaataacaaaagatgaaaaaaatgcttcaattgccttggacattgcaaaacacccttctaaataacatcttggttcaactgttaattaaaacttaagttctacttcatttaaagcacactacatataaaaacttacggccaggcgcggtggctcatacctgtaatcccagcactttgggaggctgaggcaggcagatcacctctggtcaggagttcgagaccagcctggccaacatggtgaaaccccatctccactaaaaatacaaaaattagccaggtgtggtggtgcatgcctgtagtcccagctactcaggaggctgaggaaggacaatcacttgaaccctggaggtagaggttgcagtgagctgagattgtgccactgcactccagcctgggtgacagagcaagactctgtctcaaaaataaataaataaataaatatttttaaaaaatcttatgagatggggccaaagctgtgctcagaggaaaatctatagcttatttatttgttttgttgttgttgttgttgtttatttgagacagggtctcactctgtcacccagactggagtatggtggcaccattgctcactgtagcctcaacctcccaggctcaagtgatcctcccacctcagcctccccagtatctccaccatgcccagctatttgtttaattaattaattaattaattaatttattggtagagatggggtcttgctatgttaccaaggctgatctcaaatacctgagctcaagccatcgtcctgccttggcctcccaaagtgttgaaattacaggcgtgagccactgcactcagcctttaatttaattgtaattagaagagagagagagagagagagagagagacagagagagagaaagtccgagaggaaattagcaaagcaaacaattcaggaagaaaaaaaagctataaaatagtgcactgaaagttgaaagaaagcgttcatagagattagagggagttaattttaagtaaaaaattatggacaatagtaagaagctggttctttggaaggagaaatactcttttccatgttctgtctctctctcatgtgtgcacacaggtacacacacacaaaaccaacaataatattcttttacgtttgtgtttgtgtacttttgtgaatgcttcaagaaggcagaagagcacaatgggacacaagttgcttccactctctgtgcctcagtttccaccaatgtaaaatggggataatggcagtagctccctgagagggtccctgtgaggatgacttgcgttgccgtgggtggggcgcttggctccgtgcctggcaccgaggaggtgcgatgtgtttgctgtgatcagtatcatcctctgttgcataaattcctcctggggaactgccgggttagagggagtgttcgatgtcgcagacgccgccgcgagcgctctgcaagcctgtttcccacggcttcgccaacgcagcaaccgccaagtcagcctctttgatctttgccttctcagaggagaaaagtgggatcccggggaggtttttaatttgcattgattttctaatgaatgcggttcagcattcttccaaggaggctctgcggtttttagagctggctgcaggatcctccctggggagacgtggtctttgctggggcagagccaggcgcggtggtggaggtgggtttgagtctcggggagcgcgcgggagctgggcacggccccgtgcttgagaggatctggcattttcctgggcagcctcggcgagagagagtcgtggaaggtgagttaagcctccggattatactctgccaagcagggactaaaaattcgtatccaacagaattgctaagacagctgaagactgcgattcacgccttcatcccttaaataatgacagctcacaggtattgatcgtgacctaagtaccaggccctgtccagagctttctaaacatgtgaactcccaaagtcagcatcacaaccctgagggcggtgctgcgattattcccgttgtacagaggaggaaactcgaggctcagagaggtaaagtcatttaccgaaggtcacacagctggctgggtacggtggctcacgcctgtaatcccagcactttggaaggctgaggggggcggatcacctgaggtcaggagttcgagaccagcctggccaaagatgaaacccccgtctctgctaaaaatacaaacattagccgggtgtagtggtgcatgcctgtaacgccagctactctggaggctgaggcacgagaattgcttgaacccgggaggctgaggctgcagtgagtcgagatcgtgccactgcactccagcctgggcgacagagtgagactccgtcttaaaaaaaaaaaagaagaaagtcacaaagcaagtaagtgtaggatgggaatttgaccggtctgactccattaacccatccagttatgtttaccgagcgcctgtctggtgaaggtcactgtttttggtgtgggagaaaggcaaagaagacaaagatacctacctttgaaggactagcattctagggagtagcactgacatgccgggggcagtggctaacatttaagggcgaggggctagcatttagggggagtggataactttaggaggcggggctaaaattccaaagggagaaactgatcttccagggaaagaaattgacattcagaggggagggactaacatcccagggggaggagctaatattccagggaggaggagctaacatttcaggaggaggggctaatatttttagtacaattatacactgttaatcactacctctgtttctaacattttagggtaattgcatgctcttaatcactacctctgattctctcaggcaataaaggaggggccaacctttatgagggagggggtaatatgccaaggggaggaactgacaatccatgggaagaaatggacattctagggggaggagctaacaacgaggaggggctaacatcgcaggagaaaaattgacatttaagaggggagaagctaacatcgcaggagagaaattgacatttcagaagggaggagctaacatcataggaaagaaattgacatttcagggggaggagctaacattgcaggggagaaattgacatacaggaggaggggctaacattcaaataagggtgctaacattcagtgggagaggctaacattgcaggggagaaactgacatttcagggcagggctgacactctccatccttcagattctacagcctctgcctccttgctataccctgtccctacaagtattggctgagctcatagtaggtgcaaatctctgccaccctggggatttgaacatgcctgaatagaatggagtctgccctcatagagctcgcagcctgggggcagacagttctgaacggaatgattacacagaaagacattcacctcccaggcaggagaggtaatcacgcgctcttaatcactacctccgtttctctcaggcaatacgggaggggaggcggcacccccatcgtggcctggtttgagatgttcccagccgtaggagacagactgtcatcaagtgtcggaaaatagctgtcatgggaatcctcacctcctgacaccttcccagccccgtgctcccgaaaccctccccgcgtggctgcagagttgtaggttctgctcctggtgacgggcaaccccgtaatctccaatgctcacggcagctctgctggggcacagcagctcctgggggccaaggtcccagccaggacgtggatgtcagggccgagactggaatgtagaaccgtgggagtccagagcccaggtccttccccacgaaccaccagatgtggtgtgggtttcctggtttccgttcttgttcaagtggaataaaaggaaaaggtgggggagtgacagccacacctaatgtccccccaccatggtgggggatttttgtctgttccctttgctgccgtgtcccccgtgcctgggatgcgcccagtgctgaacgatgcccctttgcacatatacagtctcacgctgattgatctgggtttactaagtgtcagtgattcactcccttgaaaatgggagccccattttcaatgtgtgactcccattgtgatcgtaggttctggggacccacagaggacaggcccagaccctgatctcaaaaacgcctcagaggccaggtgcggtggcttacgcctgtaatcccagcactttgggaggccgaggtgggtggatcacttgaggtcaggagttcaagaccagcctggccaacatggtgaaaccccatctctacttgtgtgcaaacagagcttgctggtcctcgcacatgggacagaatgagggacaggagcaggccaccggcttttctggtttctgaaggagtctgttgtgaaatatgcaagtgccttccgaccatgcgcaccaggccctctgccctggggaacaatgtgcttcacgttccttcattttcaagctcctgaatgtttccaaactaaaatgtaaatttggccccatgttttgagtctttgatgtatccacggagctccctctgaaatgcactcagctccaagaggaggaaaatcgacctctgtcttctgggaacgcattacagcgagggctcttgaccctggctgcacagcagaatctctagggagagcttttaaaataaaatcgatgcccgggccccatccccagaccttgtggtttaagtggtccagggtggagctcggctctgggaatttcaagacctccccagggatttctgcgggcagctgggctgagacccatctctctgtggttgtgaaaatacaacctcgggccaggcatggttgctcacgcctataatcccagcactttgggaggctgaggcaggcagatcacttgaggtcaggagtttgagaccagcctggccaacatggtgaaaccccgtctctactagaaatacaaaagaaaaaagaaatgcgagcatggtggctcaagcctgtaatcccagcacttcgggaggccaaagcaggtggatcacctgaattaaggagatcgagaccagtctggccaacatggcgaaaccccgtctctactaaaaatacgaaaattagccgagtgtggtggtgcacacctgtaatcccagctacttgggaggctgaggcaggagaatcgcttgaacccaggaggtgaaagaaagttgcagtgatccaagatcttgtaactgcactccagcctgggtgacaaagcaagattccatttccaaaaaaaaaaaaaaaaaaaaaaagagaaaaagaaataccaaaaaaattacccaggtgtgatggcacctgtaatcccagctactcaggaggctgagacagaagaatcgcttgaacccggaaggtggaggttgcagtgagctgagatcgcgccactgcaccccagcctgggcgacagagcgagatttcgtcttaaaaacaaaaaaaagaaaaagaaaaagaaaatccaaccttgatagctcccagaggactgagaaaggcagcactgagtggttcaaaccctggggtgcggatgggaaactggggtgaaaatgcaaagaccagctttgttgtcaatattcgttagtggtggtgggggtgctgtggctcatgcctgtaatcccaacactttgggagaccatggtgggaggattgtttgagaccaggagttcaagaccagcctgggcaacataaaaagacctcatctctactaaaaaaaaaaaaaaaaaaaaaattgccaggcatagtggcgtgcacctgtggtcccagctgctaggaaggctgaggtgggaggatcccttgaacccaggaggtagaggctgctgtgagccacgatcacgccactgcactccagtctgtgtgacagagtgagaccctgtctcaaaaaaaaaaaaaaaaaaaaagaaaactgtgaactgttgcacaaatgtaaggtttgatgttatcttcttccatgtactgtcaactccttaagggtgggaatggtgtcttttttttttgctccctccatggcaccccccacccccatcctgcgctcaacacaggactgggtgtagagatgacctcataaaacacactgcacggtaacttgcatggtggcttagcaaacaagaggtgcttaataaatggtagctaacgacaatgaaaaaaagtgtttcccaaacgttgacagccaagccccaactgtgggttcagcaggggtcagatgctgttcagagcgaccccaccctgaagctccctgtcacagccgggaataaggggaggcaaagttggggcagcagacaggagagtctgactttgcttagcgttcaaggaagcctcaggggagaggtagggaagtgacacaaaacagacatgggaggctgggcgcagtggctcctgcctataatcccagcactttgggaggccaaggcgggcggatcacctgaggtcaggagttcgagaccagcctggtcaacatggtgaaaccctgtctttaccaaaaatacaaaaatcagctgggcatggtggtgggcacctgtaatcccagctactcgggaggctgaggcaggagaatcgcttgaacctgggagacggaggttgcagtgagccgagattgcgccactgcactccagcctgggcgaaagagcgaaactccgtctcaaacaaacaaagacatgggaaagggcattccaggctgggacccagcagtgcaaacgcgtggtgctgcatttgggactatcttcgagttcgccgtggccaagaatacaccagggtgggcatgggaggtgggtgagattttttttttttttttaagcctggagggggtcaggttacatgcagcctccaatgctcagtggagggcctgggattcttatcttgggtgggggcacagggccactggagggctgtgaggagaaagggacagggtcagctctgggtcccggaggacccctctgaggactggaggagagagagagaaggctggggtgagggtccagtgggggaggaagcccaggcagggaggagggaggaagtggccaggaccccccgccccccggtctcaaaaaattgtggttttgagtgagactctgtctcaaaaacagacagacagacagacaaacaaacaaacagttgtggttttgccaaaaccaaagttatttcttgcgctcaacccttaaggcaaccaatttctggctgagaaaatagtgcaacaccgccactatgtggttatttggagttttgcagccaagaatttgaaagtaaagccagcctccaaatcgggaagcttttgagaacttcaggagggcactattgccactgacgctaaaacattagcctaaaatgttggtgatccacaaaacttctattaattcgagataaaattatagtgcaactatgaatgtttattactgaaatttggggccaagcgcggtggctcacacctgtaatcccagcactttgagaggccgaggcgggcagatcactaagttaggagttcaagaccagcctggccaacataatgaaaccctgtctctacaaaaaatgcaaaacttagccaggcgtggtggcgggtgcctatagtcccagctacttgggaggctgaggtaggataattgcttgaacctgggaggtggaggttgcagtgggccgagatcgcgctagtgcactccagcctgagtttaacagagcgagactccatctcaaataaaatacaataaaataaaaagaaattggtgaggccgggcacagtggctcatgcctgtaatcccagtactttgggaggctggggcaggtggatcacctgacgttgggagttcgagaccagcctgaccaacatggagaaaccccatctctactaaaaatacaaaattagccaggcgtggtggcgcatgcctgtaatcccagctactcgggaggctgaggcaggaaaattgcttgaacccaggaggtggaggttgcagtgagctgagattgcactgttgcactccagcctgggcaacaagagcaaaactctgggaagaaggaaggaaggaaggaaggaaggaaggaaggaaggaagggagggatggaaggaaatttgttgggctttttcaggaaaacctagcacgtgcagtcaaccctactccaaagctggcttttcagatattgagctgaaatgaaattgcttttgactagatgagaaggtaggtgaaatgcaattgaaggtggaagtgtcccccagggcattgacctgaggatgctggaggtagaggcagggggtgggggaagggcgctaagcaagggggctgctagcgaactgcctgtgggggcgggtctgcacatttttataggaagggacattgctggtgggtgttgaaggttaaataggagtttgttaagaaaagaggctgagcacagtggctcacacctgtaattccaacactttgggaggctgaggtaggaggattgcttgaggccaggagttagagaccagcttgggtgacatagtgagaccctgtctctaaaaaaaattaaaaagttagctgggcatggtggtgaacacctacagtcccagctactcaggaggctgaggcaggaggactgcttgagcctgggagttcagggttgcagtgagctatgatcataccactgcactctagcctgggcaatagagtgagatctcatctcaaaaagaaaagaaaaaagaggaagatgtgttgatacagtatgacagtgatgaagatgatgacgataactacagacccactgcagctgacaaagtgcattcacattttggatctctggctgccctggctgtggttttttggggcccattggacaaagattttcgcctttgtctgatggagaagaaatcacgggatcaagggaaataacaaatccgaagtacacagcagcctgtgttggtgccgggtgctcaatgtgccctgcttgttcttccctctgtgcccttacaccaggttgaaatgttcttcctcttcttggaatttccccacagactcctactcatccctgaaaacccagcgcagattcccagctcctagcctcaaacctgcgagggtgggtcctcaccactctcctacctcagaccctggagtccggacccccaccccactcccttctgaaacacagagccccaggtgtggtgtaggcccgaggccgggcgcaagggcagtgggtcggcggagcaggatgtgcggattcagttacatttatctggcctcagagcgatggcagagggagaggcagggctcttgtgcggggaggtcctgtgtcttctcactgctgagcctgagagaggaaaacagggacatatacagagatgtgggagagaaagagagaccaagatgacagaactggaccagggagacagagactcagcccccacctccgctcttctcccgctcaccttgttgaagaaatagatggaggtcaggatggtgaacaaggccatggccagggtcacattctgggggggagatcagaggtcaggacccttcccctccctgccctctgcccagccccaggcctcccttccctgccagacccctcctcacttcctgaaagttcatggccttgggactccagccaccccttggttggtcttctctctctttcctgggcctctgagccagaggggggagaagccactggaactccgagagggggttgtcggagagaccagaatggtggccatggcaacggggaaagggcattctggtagaggggacaggcaggggcatagggcagatacagaccctggtgtggcccgccacatgtggtgtctgaatgtgacatcgggacgtgtgagattggagagtctcaaccctgaacaccatactgaggtgtttgggttttgccccggagggtgctggggagccatgagagggttgagagcaggggagggaccaggtcagttctgggtatagaaatatctcaaaacaggagcctgcaggccaggagaacagtaagggaggcccaggcaaaatttcctcctccagatgggaggatcacttgagcccagggggttgaggctgccatgagccaagatcacgccactgcactccagcctgggcaagagtgagatcctgtctccacaactaacaactaagaaaaaataaaataaaatacatatgatacatttgtgagatacctatttacctatctatcgctaccacaaaaatggggactatacaatctgctactcaggtagctatttgcgttatttgtggcagatatagtctcgctatttttggtagttatgttgtacaactgtgaacacttattggggaaatatatgtgtgtgtgtgtatatgtatacacacacacacacacacacacacacacacacacacacaaacacatatatatagggttgggtgcagtggctcatgcttgtaatcccaacactttggttaagtgagacagtagaattgcttgagcccaggagttcaaggccagcctgggcaacattgtaagaccccatctctttaaatatatataaatataggccaggtgccggtggctcacacctgttttcccaacactttgggaggccggggcgggaggatcacctgaggtcaggagtttgagaccagcctggccaacatggcgaaactccatctctactaaaaaacaaaaaaacaaaaaaattagccgggcatggtggtgcacgcctgtagtcccagctatttgggaggctgaggcaccagcaacacttgaaccccaggcggaggaggttaaattgagccgagattgtgccactgcactctagcctgggcaacagagcgagactccatctcaaaataataataataaataaaaataaataaataaatagaaaataaatagaaaaatatatacttttattaatgaagcaatgggtccttatttgctgattcagtggtcacagttatacaacatcgctactatgaataacaagaattgattgtaaacacggtacctcacggcactacccagaacattccagaaggcaacacattctgcagagcaaacggcaccgtctctccaacaaatccatgccacagtgcaaaacaaaagcaagtagccttgctatatttgaaaaaaatccgttaagagacacaagaccagctttgaggggtgatcctggaccgggttttggcttggacaaaacaagttataaaggctctttgtgggtggaggccgaggtgggcggatcacctgaggtcaggagtttgagaccagcctggccaacatggtgaaaccctgtctctactaaaaatacaaaaattagccaggtgcagtggtgtgcacctatagtcccagctactcaggaggctcaggcacgagaatcatcagaacccaggaggcagaggttgcagtgagccgagatcgtaccacagcacaccagcctgtgtgacagagtgagatcctgtctcaaaaaacaaaacaagacaaagtctctttggggagaaacggagggacatttgaatagggaatgggtatcagacaagacgaaagcactactgccaaggagaagaggaggttaactgaaagacgcaggttacaaaattgcaggttctgtatgatctcattttggtaagaagtacatacatgaaaaactgcatttaaacatcaggtttcactctgtcgtccaggatggagtggagtgacagaatcagggctcactgcagcctcgacttcaggctcaagcgatgagtggctgggactacaggcatatgccactacacctggccagttttttggtatttttagtagagatggggtttcaccatgttgcccaagctggtctcaaactcctggattcaagtgatctgcccaccttggcctcccaaaatgacaggattacaggtgtcagccaccatgcctggcccagttatattgattttagacttccaacctccagaactgtaagggaataaatgtgtgtcattttaagccactgagtggtaacttgtcacagcagccaatacatcagtagataggaaagtgctgacatctccaggggctagaacgtggtttctagtttcttaattttgcttcaggatttttttctcttttctgttttttttagagacaggctcttggtttgttgtccaggctgtagtgcaaaggcacaattacagctcactgaagcctcaaattcctggactcacgtgatcctcccatctcagtctcttgagtagctgggactacaggcagatgccaccataccgtgcctggctaatttttgtttatcttttatagagatggagtcgggtgcggggggtgggtctcaccatattggccaggctggtcttgaactcctggcctcaagcaaccctcccaccttggcctcccaaagtgctgggattacaggtgtgagctgccagctcctggtctggcttaagcctccagcccttctacttctttattccaggggcctctaccctatttcaagtacgaggagagacagagattcacaaaacttttgtatctggtgcaggggctcacacctgtaatcccagcactttgggaggccaaggtgggaggattgcttgagcccaggagtttaagagcagtctgggcaacacagcaaaaccctgtctcaaaaaacaacaaaaacctaggacaggactggaggctgactgtgcgcagtgaggcaggagagccagccagccccaggtggtgctgcgaagtgtagattttattagcattgtgggatggtgaggccgcctgagcagcagacgattgccattgaaagatgacttgttggctgggcatggtggctcatgcctgtaatcccagcattttgggaagccgaggcgagtggatcacctgaggtcaggagttgaagaccagcctggccatatatatatatatacaaaaattagccgggcatggtcgcgtgtgtctgtaatcccagctactaggggggctgaggcaggaggatcgcttgaacctgggaggtggaggttgcagcaagctgagactgtgtcactgcactccagcctgggaaacagagtaagactacatctcaaaaaaaaaaaaaaaaaggaaagaaaagaaaaaagaaagaaaggaagatgacttgttatactcacagcttccccagaggagggggcatgccacaggggccacatggggacgcaccaatggtgcccaggaggtagaccacgagcaagcggcttccttgtgttttctgtgggataaggtagggtaaagagtggctggttgcgccatttcagcaggctctggggcacaggggctgtcctgagttgtccgataccctgccccgggtgatcagggcaggtggatggtggcctgggtggtgggttggctggtttgtacaggagaggcatgcgcttgggccagtccctgactatctccaggaactggtaaccctgggaggggtggtccttctacgatcagcaaggcccctgatgtcaaagcatcagagtacagaaaatcaagcacatagttactatcgtcagcctctgcaactcagggggtcaagactgttgctgagacgaacaatgtggggtgggggtctctgtccaagtctgcaaccaggttaaaggcacctgtgttcaaatcgcagctttgtctgagaaatctgtgttttctcaggccagttagggaacccttctgtgcctcagtttccccatcggtacaatggggatggtggtaagcacatcagtgtctcctggggcagcgatgaagatgaaacgaagatgaaacgggttaatccaaggctggcagaggcgctggggaatgggatctgtggcccctgggggagcgtgccagggcctgctataatgggggtgctgagtgcagggctgggacaggcggggctgcggcccagacagtgggctgagctcagcgtctgggctgggtggaaatggccggcctggggttttggggccaccctgctggacctctcctgctgctgctgctgctggtgctgccaccccgggccctgccagaaggacccctggtgttcgtggctctggtgaggcgcccccaccccggcctgcccttagctcccccagggctagccctgaccagtcctgtccccaggtattccgccatggcgaccgggccccgctggcctcctaccccatggacccacacaaggaggtggcctccaccctgtggccacgaggcctgggccagctgaccacggtgagaagcgggtaggcggtgagggcaagggtgggaggggtggggagtggtaggctgaggctgttctgtccccaggagggggtccgccagcagctggagctgggccgcttcctgaggagccgctacgaggccttcctgagtccggagtaccggcgggaggaggtagggccatagtgacccccacctggccccctgacctcccacctgtgacctccactgactacaacgctctctttgggcctccacctctggcctttgacctccatcaacctgacttgccctctacctctaatctctgacccccgatacactgactaacccacactgacttctgaccccatctcaacctgtcacatctcgacctctgacctccatcaactctgactttattttctggcctccatctctgttttctaagtcccattgactccagtcagacctctggcctctgacatttgaccccaaacttgatttcgatctttgacccttgttgacgtaacttgccctcttgacctctaacctttaacctctacgctttatcaattctgacctaccttttctgtctcctcctatgtcttctgacatcccccagctacagacagtcctcctaacctctgaagaacatgtattgaactctgactccaagtcctccaagctgccctcctaaacttgacctctaacctccagcctctactgattctgatcttcctttttgaccctcattgactcaattgaccccctaaatccaacatggctgtccagcttaggacgtccagcccaactgctcctgacattagcctctggacccttgatcccaacttccaacttcgaaggccacatgattctcagtgtctgacccctactccaaagtgaatctgaggcttctgatttgccacgacagctgacctctgtccccaaccacgaccccccgcgtgccctctctccaccccgctccaggtgtacatccgcagcacggactttgaccgcacgctggagagtgcccaggccaaccttgccgggctgtttcccgaggctgctccagggagccccgaggcccgctggaggccgatcccggtgcacacggtgcccgtggctgaggataaggtcagggggctggacccacgtgtggcgagggagggagcgggtggagagagaggcagctctgggtctggccgcctgagctggctccgagaagcaagactgtcctcgagctggtctgtccagaccagggtgagccccggcccacgctgctctcctggatctgggagaaactgcgacaaagacgcaggggccgagagcccgggttcccccgacccgctgtgagacccaaggcaaggcacacggctgtcctctctgagactcagttttccccagctgctgaggttccccatgcgcagctgtccccgataccacgagctgctgcgggaggccaccgaggccgccgagtaccaggaggccctggagggctggacggtgagcagggcggcggtggggggcgggatgcaggggatgggcctgggctcacccagccccgcgcatccagggcttcctgagtcgcctggagaacttcacgggactgtcgctggttggagagccactgcgcagggcatggaaggttctggacaccctcatgtgccaggtgagccctgccccttcccagccaagggtttaaggacacctgtttccaatcccagcttgctactcactagctgtgttccctcaggcatgtagttaatcctctgtgcctcagttttcccatctgcacagtggggatggcaacaccggtatcaacacctccccaggacgctgtgaggattcaaatgggttaatccacgcactgtgcttacaatagtgcctggtgtacagtgagggccttgccagggtttgaggctacacatttggcaactcctccccacagtcctataatcagaaaacccaaaacctgggcagcgggagctgacctgaaatgatgcaatgcttttttttttttttttttttttggagacaggatctcactctgtcacccaggctggagtgcaatggcattatcatagctcactgcagcctccatctccctggctataggaattctcctgcctcagcctcccaagtagctgaggcaggcaggggcacaccatcatgcctggctaattaaaaaaaaattaattttttgcagagatggggtctatgttgcccaggaactcctgggctcaaacaatcctttcgcctccccaagagctgggattacaggcgtgagccaccatacccagctagtactcttgctagtctttgctcactccagctcacgggaatgttctgaatcgcagggtgggagcagtgatgtgtgtgactaagggggctgccccggcccttgctgtgtgtgttccatgctgtgtggtgtcagcaccatcagacctttctaaagtccagaatgtctgagctgtgaaatacctctggccccaggggtttcagataaagccttctgggctgtgtaatgacgatgtctattattaactaataatcgctgttggctgggtgtggtggctcacacctgtaatcccaccactttgagaggctgaggtgggcagatcacctgaggtcaggagtttcagaccagtctgaccaacacggtaaaaccccgtctctactaaaaataaaaaaaaaaaattagccaggaatggtggcacacacttgtaatcacagctacttgggaggctgaggcaggagaatcacctgaacccgagaggcaagggttgcagacagccaagattgcgctactgcactccagcctaggtgatggagcaaggctccgtttcaaaacaaaaaacaacaacaaaaaaacactgttatccacatcatgatttcccagccagatccagatccggcccatggggggactcagaagagcagggggcagcacaggcctgcggggccagaggcaaactcgagggctcaggatggtccatctgtcctgtctccccacagcaagcccacggtcttccactaccagcctgggcctccccagatgtcctgcggactcttgcccagatctcggctttggatattggagcccacgtgggcccaccccgggcagcagagaaggcccagctgacagggggtgaggtgtgggtctgggaggctggggtgccttcctctgggagagtctaagctcttttttcccatcctcagggatcctgctgaatgctatccttgcaaacttctcccgggtccagcgcctggggctgcccctcaagatggtcatgtactcagctgtgagtccttgggaagcagtgccacatggcactgaggcacagggatgagggtgacagcgatttaggtgaggaagagcctgtggtcccagtggatctcagcccactgcctggggtaacccgtatctccaaaccctactctcaggctctaccattagtctggaaagagggaggtgacggtgttatgggaggaagaatttatgaataaatataattccttgttttctttaagaaactatgattggactaagcagtctgtccttccggaggagaaaggctgcttagtccaatcatattttgcacctacttgagcaatctttattaagtggccgcctgcaaatgttggtactgccttcaggatgggaggaaggagtagctttggggggttggttctaagaagcctgggggacatctggatgcgcaagtgtagtgctcaggagaaaggcctccagagagaagtgccgtctcagccctcgggtccacctgcagcatgacagcaccctgctggccctccagggggccctgggcctctatgatggacacaccccgccatatgctgcctgcctcggctttgagttccggaagcacctggggaatcccgccaaagatggagggtgagaatggtttggtgcccagggacatgggtgggacagaactctcaaagcaaggggtgatgtgtcaggcagagggcatggccaggtggggagctgcatgggatgatgctgggaggatgacaggtgggagtcagaagcccttttctccaggctttaagatcaatgacaggagggaggaggtgccaccatgtcctctctctccaggaatgtcaccgtctccctcttctaccgcaatgactccgcccacctgcccctgcctctcagcctccccgggtgcccggccccctgtccactaggccgcttctaccagctgactgccccggcccggcctcccgcccatggggtctcctgccatggcccctatgaggctgccatccccccaggtgacagtcctctgtgttggggtgggagtggagggttgccaagtcctggcactcaccccccgcgtgttctccctgcagctccagtggtgcccctgctggccggagctgtagctgtgctggtggcactcagcttggggctgggcctgctggcctggagaccagggtgcctgcgggccttggggggccccgtgtgagccagaaaccagggcttccctacccccagctgacactggaccccaacatgtatgctcagtagctgctctggcttctgtgacttactgtgcgcctgtgtgcatggggagcgagggctgtgtggagtctccggcctggaaactagtttgtgtgtgcatgtgtctgtgtgacggtggcatgagtgtgcatgcatacgtgtcacatgtgtgaacagtttctgcacttagacgcgtgcacaggtggtctgtacgtacatgctggtaaaaaacatgtctgtgacacacattcaagcacaaatgtacccatgtctgaacaagcaggcatgcctgcatggcacttttcttgtagagacaaggtctttgtggcccaggctggagtactggcatgagcatagctcactgcagctttgaactcctgtctcaagtgaccctcctgtttcagcttctacaggcgtgcacaatgcctggttaattttgttttcttggtatgttggccaggttggtctcaaattcctggcctcaagcaatcctcctgccatggcctcccaaagcactgggattacaggtgtgagccaccacacccaggtggtatgtttatgcacctttccatatgagcactggaagcaggtaggctggctgaggacatggtggaccctgtacgtacctccacttgcagcttgtgacaaggccttactcagtgagcctcaatgtggaccatgtgctctgtggagaccaggctcacaggagttggaccctcaagtctggttatttggtgacctccatagctctcaatgcaaccatgaacttgggtagagtcagagggatctggcagcagacctgagaaaggtgcacgattcaaagcctggtttccgaggctgtgcgcctctgggcaagtgataggccctgatgtgtctcacttggcagaaccacgactctaacccagtggactccacaactccaaaaattaacttcctagggacaggtagagagcagggaaaaccgatgacactctcggctgtgcactgtaactgctacaagtaatgtggaggcgctggccaatacagtagccatgaccatgtatggctatttaaatttaggttaaataaaatggagtgttcagctcccaaccatcacatgggccacacatccaccactgcaatcatttctcagatgctgatgagagctactcctcccacactcatgcagcagcaggcgctgtggagcacctgcacgggtgccctttgagcccctggccccccaaggggaggctcccatagtgtggcctagagcagagcgcccgcccctcccaggccttgccccacacccatggctgtgtggcactgtctaaccagggaacccgtagggagccctggtacagtggatgcttaataacagccacttggcccccattagatggggcagtcggagaaaggttcaaagccattcccagtgacccaggacctaaaaaaggcacaggatccagaaacgccagggagtggaagctgggacaacccttcctccacacaagggccacctgcatactgccctagcccatttcttcccagggtgctgagggcagcctctcatgcagactcatccctggggagtccccagacctgcctcactgccctacccggcattccctagaggagctgggtggtcatgggccaccccagatggatgccaggagccacgaccctgggaaggctgaggaatgaacacccctcacactttctggccctgggagggagcctggcttccttgcaggttcatggagaccccaagtgccaggtggggttacctgtggctgtgaccaactcccacctggtggcaagagcccaccctttcccagcagcctgctggaaggacctgttcagagctgggggcctgctagtgggcagaggcctgggtggctccccctggacgcagctcagcagctgaacccacagaggatgaagcaccagagtttggagtgttctgtccgctgtttaacaggggcccctgtgcccaaggcctcagctgtgaggtcagaactgctagggctcagtgagtcctcacagagctgtcacctgagattccggccccagcacaccctaaacccagaccaacacagaagccacacacagcaaaagcagacccatcagaagggactggctgcccacagcacacagccaatgcacgctttcagagaaggcatagcaacagagaccttaagagaaaacccgtgacaggccaggcatggtggctcacacctgtaatcccagcactttgggaggccgaggtgggcggatcacctgaggtcataagtttgagaccaccatggccaacaatggtgaaacctcatctctactgaaaatacaaaactagccaggcgtggtggcaggtgcctgtaatcccagctactccggaggctgaggcaggagaatcacctggacccaggaggtggcggttacagtgagctgagattgcgccattgcactccagcctgggcatcaagagcaaaacagtctcaaaaacacaaaacaaaccaatccttataaaaacggagtaaaagcttcaagatgcttttatgtcaagggtgtggggttgccctgcttggcctgcagtgctttggggccccatgtggtggaggggtgggcacccatggtacccacccaccctgctgcctgggcagaagtgcaacatggcacacgatgcctgggggatcactccccccagggactcatggtcagtgtccactcacaaggcctgcttccctcatgacatctggccagtgacacccacaggggaggttgggggcagacacccttctcttccggtacccttgaacatggtgtcagggtgtggctagctcgacggacaccgaacagctccacagggagggtagtgcccaaggctttttgcctcccctaccatgtcccgcacttcctgaatgcagctcaaaccaggagcagctcccccaggattctggcctgcttcacccctggagcaccaggccaggcggtgtctgtccttgagagccaggcccaggtctcacggtggcgtatggacagctcctccccataggcctggtcacaatagggaagcgggggtggctcctcccctagcctgcaggaagcccttggtagcccacttatccaccttctcctgggtgtgtggctcagcagccaagtccttgtgcactgggttgggtcccagcatgagcctggtggcctggcgggccctggcaccatggagagcagcctgctgccagtgatggcctggatctccaagacggcctccagcactgtcatgcccttgaccagctagtgctggtacaggacctgggtaacaggcatgtccttgggcgtcactggctcaggggcagaggacgaggttgaggaggaagctggatacccctgtccatggtgggctggggctggaagggtggctcagtggcctcgaagtgccgggaggactcccagctggcaccaggccatcagcagccgggtgggcagtgccgtgctgctgttgccctcagggccttgcagtggtagctgaagatggcaccttatcaggttggatcaggtcacccggcagcagcagctctcgagagctgaggcacaaggcaggggcccggctgtacacctgcaggacccaggagagcctgttgcagttcttgcccgaagcgccgagatagccagctcagtgtccctgcagcaggagcagaaccagctctggcccaggtgggtgggtggcagcgctttcctagccatggctgcagccacgcctaggcaggaaacagcagagtgtctggagggatgctgtcaggggaaggacacagaaaaggcacgaatgggggaaacagccacacccccaccatcacctcccggagtggggcccctcagaaccccggatgtcaaaggtcccggggtgcaccgtgtcctcaggggcagtcagagcccagtgctggacatcacggggtccccaagtgcagccctttcaagaaccctggacactggacatctcactgcaacccagccccagcccccatcccacctccgccccccaacagggttactaaggttaatgagcccagtgcttagggcagcgcctggctcagcacttgctgggcacctgtctacatctgccttctcaccaacaccaggagtaacaggcagcctcctctgttcttaatgagtgatggtcaggcccttcagcacctggaggcaggagggcacaggggaggggagaaggtcagtggggtgcagggcagccaagatacccaccagccctccccagagccagggcccctcagacccccgggtgtcaaaggtcccggggggcaccgtgtcctcagtggcagtcggagcccagtgctggacatcatggaggccccggtgccctcaccccctcctgatgtgggtcccaggaccacctactgtcctaagggggacatcacagaagagtgctgagagatcaggcaacaaactgaatgacacttggtccctgggggtgccaggctacctcccctccccatccagctcagcctgggtatggctccttgtatgatctaggcccactgacctcacccctccccgccccccagcagcagtgtttctctggaaaacgggactagagatgcctgcagacaggcacatctgtggggttcagtgagaggacggggccaaacccttctgcttgggcctcccatgcctaacgggatacccctcaatcgcctctgctgcccccggcccagctcttctaagctgctctgacttcaccagaaccttctgtgacatggggaaggggcagctgcctctcactgggaccctggcaggataagttcagtttattctccgcaaaagcactaacactgtgggtgctcgctcagtgggtgctgctgtttaacaacctcagaaacaccaaaagccccattttgcatagaaatatgctttgtaggaagaggggggtccttgtttaaactaatcaaggaaaattaaaaacccagcccccagccacaaactagccacattccaggtgtccaagagccacccgtggccagtggctgccagactggacaaggcgaggaacatttctatctggacagtcgtaaggaaggcgccggcccagaatccacaaatgctacgtgtcccttctgtctccctatcccgcatcagctctgtcgtctcacctctcacacatccctacccaactggcaccgacaccactcatgtccccaagaatcccctctaagccagccatgacaaacgctcagctccattcactaccccacagaggatctcggattaagagcacaggacccggccgggcatggtggctcacgcgtgtaatcccagcactttgggaggctgaggcgggtggatcacgaggacaggagatcaagaacaccctggctaacacagtgaaaccccacttctactaaaaatacaaaaaaaaaaaaaaaaaaattagccgggcgtggtggcaggcgcctgtagtcccagctactcgggaggctgaggcaggagaatggcgtgaacctgggaggtggagcttgcagtgagccgagatcgcatcactatactccagtccaggcgacagagcaagactccctctcaaaaaaaaaaaaaaaaaaaaaagcacaggaccctcagaaagatactcaggggaactgcaatcccagccaaccctgcccaaaagccagcttccctgccagaaatagctgaaacctccaagaacccggagaacacactttcagttctatttcgctgcagccacggttccagctcctgacacctaaggaacaaatgaaaatcttcccagagctgagaacacctgtctcttttctgataacacacactcatgcttgtctgattttgctctttgaaacaattctcctgataaagcctgttatttttattgtgaaaataggagttccctgaattctatcagtttatatataaacggttcactgcaggctaagctgtgcttaaagacacattgcattcagcctacaaaacccatgaagtaacgtgacagaatcacctggtagttactgtctcttttccactgctgagttttgacatgtttgattagttctttcccctgaaacgcaaatgcttgttccctccagtccacgcattcctcttcttattcaagccccaccttcagaaggcgggaagcgctagtgccccgggccatttgctcggtgcctgttccacagacacagcagtgaggcgcaaaagagtgatggcctggtgaatgtctccaagcctgtaaacagcagagctggggtttggacccaggcctgcctgccaagttttccatagttgtgagatgggtgtttttttttttgagatgggagtttcactcttgttgtccaggctgaagtgcaatggtacaatcttggctcactgcaacctctgcttcccgggttcaagtgattctcctgccttagcttcctgaatagctgggattacaggcatgtgccaccacgcctggctaaatttttttttttttttgagacacagtcttgctctgttgcccaggctggagtgcagtggcacaatctcggctcactgcaacctctgcctcacgggttcaagcaattctcctgcctcagcctcctgagtagctgggattacaggcacccgccaccacgcccagctattttttgtatttttagtagagatgggggttttcaccatgttggtcaggctggtcttgaacccctgacctcatgatccacctgcctcggcttcccaaagtgctgggattacaggcgtgagccactgtgcccggcctaattttttgtatttttagtagagacggggtttcaccatgttggctgggctggtctcgaactcctgacctcaggtaatccacctacctcagcctcccaaagtgctggaattacaggtgtaagccactgcgcccagcctgagatggtttttgtatgtaaacactgagtacaatcattggcacatcaatcagtttctagaggtacggtatgaagtcaacctagacagtgagatattttaaacccaggtgagtgaaggagcaggagcaagggttcttacctggataggcatggtgggtggtcctaagcttgaagctgcacctgtaacacagaaagacacagtgagagtgggggaggaaacagtctgcaagtccacaagccattaaaactggggcccctcagacccccaggtgtcaaaggtcctggggtgcactgtgtcctcaggggtgatcagagcccagtgctggacatcatgggagccccagcccctctgcaaccaggtcctgaggccacttaccttcagggacagaggccaagctaacagagcttaaagagtaggaaacgcggccgggcacggtggctcacgcctgcaacctcagcactttgggaagccgaggtgggcagatcacgaagtcaggagttcgagaccagcctggccaatatggtgaaaccctgtctctattgaaaatacaaaattagccaggcgtggtggagaatgcctgtaatctcagctactcgggaggctgaggcaggagaattgcttgaacccaggaggcggaggttgcagtgagccaagtcgtgccactgcactccaacctgggcgacagagcaagacttgtctcaaaaagagtaggaaatgcaaaactcatccagaaggtaggaatgaccagttttgctcatggagacaccaagatgccccaacctccccagtgtcacaggtcctcgggggactgtcctcatgggatgggtaggaccccaaatgcactacatgaagatgtccccggtgttcatcccccactgtttgcaggtttctttagcactgcctacatctgcacataacccataaacagagaaagctgccaagacacaaatcccctggaagaacttattgagagaaggaagaagaaacaaagccaacttgtaaataataatgaggagagaccctcgactgagtcaggtttgaacatatcagctgtaaaagacatttcgaagatgactgaggaacaacaggcacaaagcagattgttaaattgcagtattaagggtgacaatgctaataacattaagtagaaaaatgttactgtaggtacacaagtacactattttgagtgaaatatgaacctttctttcaagtaagagtctgctctgttgcccaggctggagtgcagtggcgcgatcttggctaaaggcattctcccacttccttcataagtagctgggactacaggcccgcaccaccacgcttggctcactttactatttttttgtagaaatggggttttgccatgttgctcaggctggtcttgaactcctagggtcaagcgacccacccacctcggcctcccaaagtgctgggataacaggcatgagccaccgcgttcggccatgaaacttactttcaaaacacttaagcacaaggtttttgaatatggcaagatggtgcaaatgttaacttttcccatttgttggtagattttaatattgccaaaggacgacgtgccaacgatgaatgcatgaaaaaatactttcacttgtgacatgaacaaactcaacgattttctaggtggttgcctgaaggaggtaagtcaagtagagatccttgctggggtcgtggtgggggagataggaaatgggctagctgcttccaggctgagcctcctcggcaggggcatgggccccgctcaagtcaggaaaccgatgttcaagaccttaaaggacctaagccaaaaactaacgttaacaaaaccctctcacgtggcatgaacggtcagaacgactcccgcaggtaagcaaaggcctcgtttgcttccttctatatccattcctacacgactctcaaacccggcaattcacctagaaacttcactctcacttctttggtaactcgataccctatctgtgcccccatggaaccccccaaaaccctctcccgtcccccagtctttgttctaggttgcacaaaaatgccagccatccagaattttaaaagcaagagagaattcctaaggaagcacctgtaggtagcacgaaaatggaaacactcggaaagaactcaatgtcgcctcccagcccgcccacccctctcccccaaccaaatcgacaagatggcggaggcccgcggcgtgcgggcagcacaaggggcgagctccgccgcggggcagacggaggggggtccgccccagcatccccgctcgcgccagctataggagtcgcaaactcccaggcggcccaaacagccaccaccatccccgcagaaaactcccaggctcgccccggagggcgctctctgggtccttgcaaacgccctgaccctttccacgcgactacatggccgctcccgtcgcagcctcgaacccttcaggacacgtgcgtctttccacacagccggaaaaagtaataaacttaagaacctcaccccagcatttctctctccgaagcgggcgcgggttgcagcacgcgccattttatagtgcgcgccgctcgcaaggccggtcctcggcgccagcccgcgctccgcccgaggcgtccaatacacacgcctgtttgggaaaccccatttcatgcttagggaaaggaatactgcctgcttccgctagaatcttcctgaacaagcgaggagacgctgtctctggggctgacaaaaaggggcaaggatatgatggaaacgattgtcttgtcccctgcgtccggcaattctgaagacagcatcaaagatgggccgtgaagagaaaggaccccgagggcggcccgacacgagagagaatccgctgggactatttgcgcggcaggggcttgagctgagtgaggctgcagaggcggggcccaagccgaagggccggacccaaattaagtcccagccactgggctggaggcggggccagtgtggagattgacagggggccgtcctgggaaagcgcccacgtggcgcagaattagaggcggagcctacacggtgacgcaagggccggaaggagggaccctgtgtctggagaagcgggagatgggggcctggacccctgggtctgagggaggaggggctggggtcgtgattcccgtgtttgggagaaaagggggttgggagctgggactcctggggccgagggaggcctttggggctcccactcagttttgacggtctaaggcctgggggcctggattcttggtagggttggagatctcaggagtgtctttccactgataggattatacattctttccacttatatgattattttgaaaattaaaaaatgaaacttctctactccaaactcactttctaggagtttcactgtcaacaatttggtgtggactttatgttttcttttttcagatggagtcttgctctgtcgcccaggctggagtccagtggtgtgatctcagctcacttcatcctccgcttcccgagttcaagcaattctcgtgcctcagcctcccgagtagctgggattacaggtgcctatcaccacgcccagctaatttttttgcatgtttagtagagacagggtttcaccatattggccaggctggtctcgaactcctgacctcaagtgatctgcctgcctcaaacctcccaaagcactgggattacaggtgtgagccaccacgcctggcctggtatggactttatatatatatacacacacacacacacacacacacacacacatattatggataaagatacttttttccactctaatctgtcccataagttgtttccccacatgagtacgtacagaattatctcattcactgaacaatggcaacgggctcctttgtgtgaattgaacacgctttgtttagcgggtccctggtcatttgggttgttttcttctttctagtgaggagattcctttcatgaaccttgtggtctggagtaaaagaagagacctacattcctctcttaaggcaatgagagacgtttatgtcactggctgctgcctcactttagcataaaagcaaagtcctcgctgtgacccacacagcccttagtgatctggcccctgtcccctctcagcctgcatctctttcctctcctttggcctccctggtgctcctggaacctgccaaggacgtttctacttcagggactttgcatgtactgtcctctctgcctggaactcttttcccccatctacatggctttctgcctcccttggtcctatctctgctcagatgtcatcctggaatggagtctcctgacctccttgcctccactttatatgactgtgaggctctcttgttccgaatcccatctcacctaccctcctatatttttcgtcataacatttacctctaacctattgtctgctttattttattttattttttgagacagcatctcgctctgtcacccaggctggaatgcagtggcatagtcatggctcactgcagccttgacttctcaggctcaatcaatccacctgcctcagccttcatgtagctaagactacaagaggacaccaccacgcccagataatttctgtattttttgtagagacaaggtttcgccttgttacctaggctggtcttgaactcctgggctcaagccatctacccacctcagcctcacaaagtgctgggattacaggtgtgagccaccatgcccggctctaactacttgtttatggacatattttgctgccttgctgaatgtcaattccataaagataaggattcgtgtctagtttgatcagtgctatacatccagtgtctagcatatggttgcagctccatctgtgtttaaagatgaaatttgcagcgaggagtggtggtttaaccctataatcccagcactttgggaggctgaggcaggagactgacttgagcccagaagtttgagaccagactgagcaacatagaccccatctctagaaaaaaaatttaaagttagccaggcatggtgtcacatgcctgtggagccagctactcaggaggctgaggtgggaggattgcttgagcacaggaggttgaggctgcaatgagctgttgcaccactgtactccagcctgcgtgacagagagagaccctatctcaaaattaagtaagtaaatgaataaatttgggagccttttgcaggagacaagggggaggattattgcaatagtacagaaagagcacacactatggaccaggcattgtgctaaatcctatctagattaaagtactattattatcctcattttacagatgggttctacaccttgcctgtggtcacagagctactagtgacagagcctggactcaaaaccaggcagcttagccactgtatgagagggagatagatggcagccccaggccaaggccctgtaggacaatgatatgactttgtacttggctttcaactctgccctgtccaggaaatggctctctgttagccccaaaccatcttcaaagggccattacacagccttgtgctgggggactctggggaaaagaaagacggggtggtggtaagagctactgttaagcgtaggaggtgaagtgtgggtgcagggggaatttgcttccggaagggtaaattattaaggactgcaaaaataaaggatgaagctaaaagggcttggggagaatgagatattcggcaaacactgattaagcactatctgtatgccagggaccattggctcggcctctttgttgaccttgtgccttgagtcccttacttatgagtcccttcccttccctatccctctaccccagagggcccaaagatggccccagagaggggtttcagttccaccaatgcttccaaggctcagagctaaattaaagaatattctgggcagaaaatacagattattttaaaagaaagattattaatctggattgaggcgggtcagaagagactgaaaaaagatgagtcttcatggggttaggggccagagagcagggttgtcagcgtggggttaggggccagagagcagggttgtcagacacttggcagagagctgttggagcaggccagcggtgagatcattcgcgtgtcttaggtccggatgggctggagcgccaggatagaccagaagtacatgtaattcagataggacaagaagccttgtggagaggaagagggcacaggagatgagacacagagttcacccacccaatcccaatcacagtcctgtccccaggcccaattgcatgccctgctctgcatcaaaccccatccccaaacctattcttaaacccatcaccaattccattccataccctaacctattcccaaacccatctccaaaccgaaactcaccttcatcccctacactgtccctaacccatacgcaaactccaacccagtcccatccccattatccagccccatgtgcatccccaatcccgcctcccacttcagtcacttcctatctagccctgtccacaaccccaccccgtcccaaatgctatcccaaatgctattcctgtctgcatccctgaacccatacccaaagccaacctcatcctctcccataccagtcatcaggaagaggaagacactggcccaggtcaggtagaagctgagtgccagctggtaggtcatgccttcctgcaggtacctgtgggcctgcagcaggtagaacaggatacccagtacgatgctggttcctgcatgagcacaggtgttaggaggctgagaatcagatatgtaaggactccttcccatagtcatgtggctgcctggctctggctcattatttccccactttctttaacctcccagaccctgtacctttgctcctaagcatgaagatgggcttctgaccaagtcctgctagaggacactgaaagggcaagccttgggctttaaccaggcaatggtaagtctgtaaccacaggttttgaggccaacagcagggatcttccctgcctccacctctggacttagggcagccatgccatatctctgagcctcagtttcctcatctgtagagtgggcacaatcataggacccatctccttgggccgtcatgaggagttactgaggttggcacatttcctgatacacagcaagcccttagggattgggattgattattttcattctattgggtctttaatttagggcttcagaagcaatagacaaggaacttggtcattctggatatattggaatgacatgaattaaagataatttgtgaataggaaaagactttttcccctggacagtggagtactgggtagttttgtctgatgttattgaaaataatatagaaggtattttttgtttaattaaaaggaggaatagacagaaatggttttcttatagaaaaatgttctgttatagatggtttaaaacgaaggtgttttttatagtttttagaaaactcatgctttttttgcgcaatattctataccttgtactttatatttaaacaattaggaagagctactagataaactgcataaatgcttttttttttttttttttttgagacagagtctcaatctgttgcccaggctggagtgcagtggcgtgatcttggctcaccacaacctccgcctcccaggttcaagcaattctcctgcctcagtctcccaagtagctgggactacaagcgtgcgtcaccacgcctggctaatttttgtatttttagtagagatggggtttcactatgttggccaggctggtctcgaactcctgacctcatgacccacccaccttggcctcccaaagtgctggtgtgagccactgcactcggccaagtactgacatttctaattcaatcctcagtacgtttccatgtggtagcaaattttgtcctgatcctacagatgagaaaactgtggcttggagagatgaagtagcttgaacaaaatcacagagctgctgctgctgatgggacaggatttgggatgaggttagaatgggaaataggattgggtattgggtagaggttgaagtttgagtgttagaggacgaggttgagagtggtgtcaggaataggttgcagttgggatgggttgtggttgaaggtgggtcgtagttggggtgggttgtggttgggggtgggttatggttaggggtaaggatgggttgaaatggggtagtttgtggttgaggatgggttggaacagggatggtctggttgggggtgggttgggatggggatgggttgtggttggggatgaggatggggatgggttatggttggaagtggattgttgtggggataggttatggttgggggtgggttgtggatgggatggttgtggtttgggttggttgtggttggagtgaattgtggtggggaagggttgtggtggggatgggtggtggttgggggtaagttgtgatgggagtgggttgtggatgaggataggtcatggttggggatgaaaatggattggatatgggtaagaggatggagtggggaatggactagattgagtttggcattgaagttcacaggtgatagaattgggttgcatttgaaacatatgttgaggatggttgggatgctgcaaagttggttgttgagatgtttgaagaggttgcggatggtaatgaggatggtttggtgattggaaagaatgtagaattgggatggagtaggggcatgagggaaagggatgtgaatgagtttgagatttgttggtgatggagatgggacttgaagtggaggctggtattggggctggagatagggttgggctggtggttgatgttttttatgggaatgggttagagatttggaaggagatggggttgggattgcggatgatggtcaggatggggatgggattggagtgtggtggggatgggattgggtttcatgattggcactggaggaggtactcctcgccttggttcctgagggaagtgccatgcctgtcaggatgctggtgatgaaggtgaagaaatccagcatggacgggttggagccggtaaagaggatggtgcttattagggctatgcaaaggcagaagctggtgatgctggagaagaggaggaaggcccaggaaaggtccagcaagtctggggaaggaagataatcaggaacaccatgattggcccaggctctgagtatggggacaagggtcaccagttggtgtgggagtattctcaaagctcctcccttgcaaattatttattctcattttaggaaaatttaaattgggctccagagaagagacattgagactgatacttccagcactgaggatctacctctaggttggtgagggcagcttcttgggcagtgagaagtggggtgggcagtgaggagcattcccagaagtgaggaccactctagggctgtgaggacaatcctagggcagtgagaaccctctgaggcagtgaggaccgtcccagtcattgaggaccatccgagagagtgaggactatcccagggagtgacgaccatcccaggcagtgaggaccatctcaggcagggaggaccatcccaggcagggaggatcatcccaggcagtgaggaccatctcaggcagggaagaccatcccaggcagtgaggaccatcccaggcagtgaggaccatctcaggcagggaggaccatctcaggcagggaggaccatcccagggagtgaggaccatcccagtcagtgaggaccatcccagggagtgaggaccatcccaggcagtgaggaccatcccagggagtgacgaccatcccaggcagtgaggaccatctcaggcagggaggaccatcccaggcagggaggaccatctcaggcagggaggaccatctcaggcagggaggatcatctcaggcagggaggatcatcccaggcagggaggatcatctcaggcagggaggaccatcccaggcagggaggatcatctcaggcagggaggaccatcccaggcagggaggaccatcccaggcagggaggaccatctcaggcagggagggccgtcccaggcagggagggccgtcccaggcagtgaggaccatctcaggcagggaggaccatcccaggcagggaggaccatcccagggagtgaggaccatcccaggcagggaggaccatcccatggaagtaagggccatctcaggcaatgaggaccatcccagggtggtgaggataattctggggcagtgaggattattccagggcagtgaggaccatcctggaccagtgagtactatcccagggcagtgagaatcattcgagagcagtgaggagtatcccagggcagtgaggactatcccggagcagtgaggaccattctagagctgtgaggactatcccagggcagtgaggattatcctggggcagtagggactatcctatgacaatgaggaccatcccagtgctgtgaggaccatcctggggcagtaaggaccatctcagtcagtgaggatcatttcagtcagtgaggatcatcctgtggctgggaggaccaccctggggccgtgagactcataaaatacctgtgaagatcattgcaggaaaggaagaaaccattctgtgacaggtggaggggtccctgggataaagtggagcgatgggtcccaggagtggtgagggcagggcaggccttccaagcatcctggctgtgctcatgcaggcaggagatgtcacagcactgcttctcctcccccagaagtctagctcagaacttggcctccggcctgggcactgcctcatacctgccagaattgatctcaatggagctgcacaatgagaggttttgcatgttgtctagaggactttggttgagttcagagctgagcacacttgccttcagactctcctgggactcccaggtaactgattcaatgcttttgatactgggctcggggccgtaggtaagtgatgggagcacattgacaatggcccaggcttggaagttgggggttggaacacttaaatgggcagtctcggttgttgacaggtagttttggtcatgatctttgttgctggggataattgatgattagtcagggggtgagagccttggatactgaagcagcgagtttggaaaattggtgaagcacctcgcatactgaaatcgtggctgtaggtaatggctggtgtttctgggatactgatctgttgactgctgatagctggtgtagggtcttggatactgacctggtgattgtgaataattggcaaggggtcttggatactgaccaggcgattgctgctggctggtggaggctgttggatactgaccccgtgactgttcctggctggtggagggtcttggatactgacccgggaattgtaggtaattggcaccaccgtgcctggctaatttttttgtaattttagcacagatggggtttcaccatgttggtcaggcgggtctcgaactcttaacctcaggtgatccacctgcctcagcctcccaaagttctgggattacaggcataagccactgcgcctggcccttattattattttttaaggtatagaaatctagaatttttttttttttttctgagacaaagtctggctctatcacccaggctggagtgcagtggcatgagatctcggctcactgcaacctccgcctcccaggttcaagccatcctctcacctctgcctcccacgtagttgggactacaggggagtgctactattcctagctataattttgtattttttggtagaggtagagttttgccatgtttcccaggctggtctcgaacttgtaagctcaagcaatctgcccaccccagcctcccaaagagctgggattacaggcatgagccactgtgcccagccttagaatttttaggtagtttaatttcttcacctttgtctctgtgactttattaattgcttcttggcttcgggaggttctccctccagatttttgatgaacattcagttctgtttttttaaattctcattacttatttttaggttttgattgtgattttggagttggtatgcagggaacattgaattctgtgctccctgctgtcctaaggaagggacttgaattagtcaggagtttttgggtcacaagtgacacaaactctttttttttaaattttttttattttttacttttttaaatttgagatggagtttcactctttcacccaggctggagtgcagtggcgtgatcttggttcactgcaaccttcaccccccgggtttgagcgattctcctgcctcagcctccggagtagctgggattacaggcgcccgctgccatgcccggctaacttttatctttttagtagagacggagtttcaccatgttggccaggctggtctcaaactcctgacctcaggtgatccacctgcctcggcctcccaaagtgctgggattacaggtgtgagccatcgtgcccagccacaagtgacacaaactctaacttgaactagcttgagtgaactagttgtattagcttgagtgaactaacttgaactagctaggggatcctttatgggatcacctgagtgaaaaatggtaatggtaggaatgccttcaggcatgggtggatccaggggcccaagtgatagtatcagatattactgttttttggctatgggattggcttcattctcaaggctctgtgtagtggcaagtcagaatccagtaaggaaaataaatcattccagattcttcagaaggaagtaaatacagggaatttgttcgtgagtaacagaggagctgagaagccaataggaaatagtgaggcaaaccaggagttaggaactacaggatgctgctacttggccagaaggacaaagggaggaggtggtattactacagtccagaaactgcagccctctggaacgcataggttcatggttggattgctcagaagtggctagaatcagagaatagatacaactactacggaagacccaccacatgcagagatagagaggctaataaataccctggcttgccctctcctcccagaaccagtcttctgccagtgcctcccattagtcaaacacagtgataagatggtgagcaaaggaggctgggaaatgtggtccttgcagtgcagaacaggacagggcgggaaatggatctgagagcagacagacaaaaaactggcagagttgttagcaacttggcagagttggtaataactgccgagtccggtagaaaaaagttatcaacagttcttgcaagaatcctgtgtggcttggggcacatgagcaccccgagccaattatatggccagtggagtacagttggctgattggcttaagactggggctgagaatggggaatgggcaggaggtgaaatgcatggtggggaggtaagctgcaaatatccactcattctgaccaaatcacagagtgggctgctctctgggatgacgagagccagggacttcagtgtcagctcaatgctctttcgcttgtctgttttccttcttagttttactctccccatgaagctaggtccaaggcttaggcagcttcaggcttgtaatccttgaggagagactgcttttccttgacagcttcctaataaaaagtcttggggcagagcttgattggttgggctttggtcatgtgtccatctttgggccaattgcagggtctgcagctggggtactgtgattggctcagccagaatcacatgattacctctgtggcccagaggccagcatatgccaggagaatccctcatccagggttatgtgagttgggtggagggtgtccccaagagatgtcaggctgctgttctgggcagaccaaattcaccattcaaggtcttggtttctggcttggtgccttctccctgacctctgcttcttgactcttcaatgagcagaaagaactaagggaactggctgggcatggtggctcacacgtgtaatcccagcactttgagaggccaaggagggaggattgcttgagctcagtaatctgagaccagcctgggtaacagtgagaccccatctctatgaacaaaacaaaacaaaaacaaaaaaccaaggggtctgatatttcccccacttcccagagtgctgttgctcttctgtatatatgatgatcctttatctttcttgttgggtattagagatgtgcagtttgccagaaacaaagcagatgaggtcttggcctatttggctaaaacaattttgcactgttgaaaagtagacaaagtagaaaaagggctaaaaggaggagatgtagcatctcggaaacaggtaaacctctcttctgctggaagtctaagttggataaatatccactgtaaactggaactaagcttttgggcacattggttttagagtatttgacttgaaagtttttcttgtgtgcaaatctgtatgtgttttgtgggggctctcaggtgtgaacaagagatgacattaggatgtctgaggagattctcggcatgtgaatggggccactaggggaccttggggggtgactagcagagactagagcagaagtagggtgactttggagaggactggggtgaccgtggtgtcttggataactttgagggtgctgttgagggtgtctgggagtgaaactgaggatactaacatgagttgttatgagacaccttttaggagttcaagtagggtgaccaggggtgtctgtgggggtggttctagaaatgatcgaggctgggctcagtggctcacgcttgtaatcccagcactttgggaagccgatcacctgaggtcaggagtttgagaccagcctggccaacatggtgaaaccatgtctctactaaaaatacaaaaattaggctggcgtggcagcagctgcgtgtagtatcagctaatcgggaggctgaggcaggagaattgcttgagcccaaaggcagaggttggagtgagccgagatcacaccactgcactccagcctgggcaacagagcaagactccatcttaaaaaaaaaaaaaaaaaaagaagaagaaagaaagaaatgattgaggtgattctgtggggtaaccttgaggatgagtgggatgacctttggggggtcctctgtggggtgaccttggggggtgtgtgggattatgagagtgtctgagaattgagttttaggttaagtaggggtgatttgggacaactctaagggtgtgactgggggatgactttaggggtccctgggggtgaccttgtgagtgagattggagtttctttggggtttctaggaggtgactttggggaggtgagtaggggtgattttgaggatgtgccagactttggggttgtctgttgggctgcttgtgggtatcagcagagatgactttggagggtgaccaagaggggtatctggggttgactctggggcccctgtccccctctccccagttctcatccatatgagcaagggcttcatgttactggccgtggccctgtgctgagtcctcctcccgcccatggccctctcctcctggccagtggtcctccgcctgaacatggccgactttgtcttcagtttcctctgcctcggcattggtaggtgttggcttggggggcgggggccctccctaaccccagccctgctctctggctttctggaggtgtatctagacttccgtgctgctcccctcggggcctctgtcttagcatgtctctggggagctctgactcagttctactctatctgtgggatgtctctctctcccccactctctgtttccctttctttttttgtcccctctctccaggtatctttctgtctgttgtgagggcgtgtgtgtgtgtgtgtgtgtgtgtgtgtgtgtgtctgcttgtcacggagggtgggagaggatgtctcagtccctcttttcttactgggggtcatagggctcactgtccagccttctgtctctggccccaccccattgcagggctcctgatttctcttcagcctgacgctcttttcagttaacggcaaggcggtgcacccaagtccggtggtgtcctacctggtgacctcctacctgtgctgggacgccagcgacttgatgctgcactccggtgagggcggggcctcgggaggagggcggggcctcgggaagcgggtggggcctagggtgggactcggagtacagcggcccacctagccatctcccaggagccgtgtcctacctaagcccagtgggcatgtgaagcagagggcagcccttgaatgcgcggcggctgagctaccgcgggtgggccgtgcagcagggcgcagcgaggcggacatccaaacagcggaactcagacgctgactccgagcgcaccccgggccttcccatttcatacaccctcgaggatgagacccaagcacctccaaggaatagcacccgaggtcttcaggacaccgaccggtagccatggccagatgcccggccaaccccttcagcgtggccacgccctggatattcgacctcccctgaggccccaccccctgatatcaggccacgccctccgaggggaccggtggcaaactccagccctcgctctagggcccgccctttgcggctttgtccctgcccactgggtcctcacagtacctccaccccagaggcccagcatcccctcccgttctgcagacacttgtccagcgtcccgctgagctcggcagtgtggctagtttgtgtggccctgcccctggtgcccagccagggtggtctgcatggaacttctttcccggagttccggcctcagctccgatgtccacccttgtccccaggtggacacagcaccgcccagcatttggtgcaactccacccttctgcagaacgggcccctccctgggaaggcatggcttgcaataacatccctctgtaccttttctggcttccccgccacaataaaacctctcagcctcagaccttccattgccccccacctccccaccagggcagggtccatcctagtgtgagtgaactgttctggcgtccctgacttgccctttgggatctgagcctttccctgcctgtttgtctgcacctgtcacagccccttcctttccccacctgctggtgacctcagacttccaggcatgagattgacacagctggggtggccccagcctcagccgagtgggtccaggtgcaccacatctggaaagataggtgatggcagaacgtgacacacattggatgcacatttgattttactgggggtaggggacagggctgggcgttcaggagttctccgctatggtgtcctcgatccacttcacataagacagcactctgacggcgacagaaggcttattgggggtgccacaagggacgtagccccatgatgtgacaccttggagcacaccatcacacatcagcgggccccctgaatcaccctgggagcacaaggtgggaggggagagtgagaaaggtctacggggcccaagttctgcctggggagccccagctcgcagacagggcctccagtgcccactcccagaggaaggtgggcagggattcccacagaggggacagggtctccagtcctggccaagggggaagggacctcagggtccagctcctgcacatggggcagggtccaggtggacagtgcctgcagacaggttagggggaggaggggcaggaccatctgcaggacgctgcccctgcgggcacatcgcagaggccacctctccaggactactctctgactcgacggtaacaacacattaccacgaggaacggtgaactctggtgtggggggtgagatgcagttgtccctggatgggcgggggaaggagggggagctggggcactgatggggcgagtggctacagctagctgggaagcagtgaagcagatgcctggttagctctcagaagccagttcagaggctgagtcccctccctcagcccttccagaccctgggggcagggctgcctcaccacacaggtgtctttgccaccttccaggtgtccgacacacagcatgaagtctgtcaccttctggacgtgggcttttttgcactcatcattaggcaggattttgaggtccacacactggagatcatctggaaatgagactacgaacccgggagaaaaagggctgcagcccgacctcacctgcttccctggccctttctcccttggacgcaggagtccccatccccgccttgggctacacagtctgcccccacatacaattctctggttcgatgctgccccagccggaagccaaacaggtgctccccacttcgggttcctcggtgggcaactccacgaccttcacagcatctgtgatggtatcagcaggctctgtcaggcggagcagcatgaggtcgtggctgtagtcctcgtctgcttggcgggtgtggttctccaggaggctcatgttgaagccagggtgtgggaagctctcactgacatgaacaaactgggctgtgttttcgtcgtcaaacaagttgtggcgacccagccagagctggtaattgctggggaaagatgggaatggagggatgagaagacgggaaggggaaaaggggatggggcaggggagcatgggggagggtccccaaagagagaaagggaaagagaaaaatgtgggtgggcggagacagaggaagaaagatatagttatggagaaatacagacagcgaatgggaagatgaaagattttgagagtgcaaaaggcaaatgaagagacagagcaaaaaagagctcaaaaggacagaggggtgaaaaaggcggaggggagggcagtgagaaacagggtgagcaaaaaagaggcagatgagaaggataaaagacagggacagcgagaaacaggcccagggaagagggaggaagagggaacagaacacggaagggagcgagaagcagacaaatgaaaaaggacgcgggacgtcagagtgagaactagaaacagaggcagagaggaagcaggagtgaccgagtgtgggagagaaaagggagggaggccctgggggagggtgggggcaggtggggagggtgggggcaggtagggaggaggggaggcctgagagcggctcagctgcagctggggctgtggtgcgggctccccaggggcaggtggcctggcctgaagtccaaggtcgaggcccccttcccttcccagcaccctcccgcgcgtttctcgccccgcctcctccttcctcctccctcagttgccccacccagctcccgctgaaaccagcccttccctgtgtctctccagagtggagggatatcctgtggggcggggagctggacagagggagaggcgccccctcccaggcacacaagttggggataaagcccttcctttactctggggcctcccttaggtccatctgggtgtgtgtttagtagggatgagggagcggtgaggtagagacccagagagagagagatgggtagagagatggagggtgagacacagtgacagagatgccgcagagagactcagagacagacagagacaggggagatgcagagacaaggagacagaggagagagaggaagacagagaccagaacacagtcacacagagacacaagcagaaccagatcccaagagacccaggcagccttggagaggggtgtccagcccagctctgccctgccaggcgacctgcgccagagccttcctctctgcctcagccccccagtcttgcctgaggttatccaaggggaatgccactggcctgtcaatcctgtggcagcatagatgccctcctcccagaccccaggcccctactcactcgctgatgcaatgagcagctgtgagcacccactggcggtgcaccaggatgcccccacactggaaagtgctgaaatggtacagagccgcctgccagggctgggaatgctgctcacactcccagcctcccacaatccgggactgaatcgggggcgcagcacctgcagaggcggtgctgggtcaggaagggcagggttggcaggagaggccagggacaaggctaggagagggagctgggctgtgggtctgaagggacattgcgggtagaggaccagggctggaggttggggacatgggcaaggggtgttgggaaggggtgggactctggactgttccctgggcttttggagtggtggctggacctggtggggagattttgtgctctgacagtagagcagcctccagggatcagggtaggagacaggagacagtgtctggagcagacactgcatctgggcgtcaggtcatttggggtctggggctgggggatgggaggtggtgggttaggggagtggaaagggattctggaaaccagggatcaaggcgccaagggtgggacaggatcagaggctcactgaggaagaatctggagggctaaggggctcctaggctagggaaacaggacctgggttgggcttttgaggttcaggaaaggatgcagctttagggaaccaggtctgagaggtaaagaagagcatctggactgaagagtttgggggtgacttggggtccctacattggggttggaaggggccagcttggctgggacagttagatttcagggcttcctggttaaagggtaaaagaaagggctatggttaaggctagaggtgggcttccgagaggttttggggtccttcctgtgaaccaggaatggcaatctgaggggaggttggggccctgagaacacagttgcggtcaggactgggacggggctcaggaggagggaggcgtgagtggcagtccttctcggacagggtgaaggatgggatcttcgtttctcatggggatggggttcatggtctgagggtactggaaggatatggggtcctcttggaggcaatcctaggaagaggattggagaagtggtgagaacaggcgccaagcagctgtgggaatgcaatgcaggacccacttgacgtgaggttgtagaatcacatactgacttgggggaggccagggcagaagcgctggctgagaaggcattcaggatccttggggtggggttccagaaaaccagagctgtgtaggaacaattcaggcagagaagggctggggcctggggcgggatggaacttccccaaggaaaggagcatgtggtgggagggtgtggtgtttttcctgggagagctgggggtgctgggtgggaagggacatttgcagacccccccccataccagatgggggatcccacatgccagtttgggaagcagggttttctggtgaaatttgggggaccctggaaggactggggagaccagatgtcagggtctggaggacacagttgagagcggacagctggatggaaaaagtcactggagtgtggtgggatttgtagactcaggagccaaataggtggccgcagggaactagggggcaggaggggatgatcagagtcctgtggggtgggggaagcccatgggagggttggggtcctccagagagagacagagatggcccagaatctgcccctttggtaaagcggtgggacagggcgttggctagggaagaggagaaagtactgaggcttcctgggaggagcaggaatctggtgtgggagtgagcactatgacaacatggaggagcgggggtggaagtttagggtggggccgcgcaagatagataagagccggggcaccccggactaggatagactgtgggccagagggatgagggtggggtgttggaggggaaggtcttatcggggggggatgtgaggccagcaagagaatcagggcccgttccccctcccacatccccccactgtctcaccagtcccccccagggacagggcgaggcacagaaccaggaaccacatggtgacagaggtgtccaggggccagcaggtggaggaactggggaacctccctggggaggcttttaaaagcccttatcccctcagagccccacccctgccctgctggcacccagatgttggccaaggcccttcccctgttgcctgggggctggacaattgccccccccccctccgatccccagagctgtagacggggagggagaaccagcacctgttctgcaggccctggatcacgctggacgcattcctggggttgaagccaggtggggcagggcctgtggctctggggctttgctctggggagcagccagtgaggcaaggggggactgaggggaagcagaaacaggaagacggaggaatcagtgacccctggtacaaagccccatatacctcagtctcaattaaggccctgcacccccagacctggtgccctcaaacaccagcagttagggctctgattccctgcaccactcggagccaagatactagcatctcagctgccagttccccctgaaatataagccttggccttcagaatgccctggttcttgcactcccagacccaggacctaggtccccaaagctactgttcctttcataataaaattttggggtacacatcaccacattcctagtgcctccagatccaggaatgtgaagtttcaggggtctcccagggtaagttctttagcattacaaaatccagtgtccctcccaaacaatgctggggtctcaatgagcctcccacttcttgctcccagttatgggtgctcaacgtcctgtcctccaaagtcccagagatctggacaaccttccctcccaggtcaagatcaggctaaccacagattccaatgacccttcccccccaccaccagtacaatatttaggtctcacgagccaggttcatgtacttcaacattcagcgaccttgaacatcacattttgtggtctctgaagataattaggaactagattcctgcagcctcaatggtaaacccataggcttccaacaggttgtcttggctttttggtaaaatcaaagcagctcagagttccagcctctgctgtatatcagggacctggctaaggaaaggacagtatttgcctttttgccatggctaccaggaagcccagaactaaatctttttttttttttttttttttctgagatggagtcttgctctgtcaccaggctggagtgcagtggcgcgatctcggctcactgcaactcctgcctcctaagttcaagcgatcctcccacatcaccctcccaagtagctaggattacagtcgtgtgccaccacgcccggctaaatttttttagtatttttagtagagatggggtttcaccatgttggccaggctggtcttgcactcctgacctcaagtgagccgcccgccttggcctcccaaagtgctgggattacaggtgtgagccaccatgcccggcccagaactaaaccttaaagaaaaagccattcttggtaatctagtgtctgttaggtcctttaactgggatccagagatagagggtatttactcagtgccagacacgattttaatcagttcagacgaatcatctcatttaatcctcacaacagccctttgaagtcagcaataagatggtctcattttacagataaggaaaccaaggcgaagtgagattgggcctcttgttcaagatcacacgggtggtcatgtgtgttgaatgaatggagccctgcttcaagccgcttctcctcacctagggatcggggtggtgggtgaaaaggaacagtgtacagtgtctcggggtttctctttgaccccagaaaaaagtcacagaaattcctacagagcaacttggatcagcgctttgttatcttggcattaaacaggtgaccttgagcgccagctttgtcctcaggtgggacaagtccttggctaacatctgggccttggacagggtcttgggggatggctccgttctgttccatgtcaggcggggctgctggccagctgtgggggcttctgctcagtcaggggcacaggagataggctagaatagtcagttcctcttcatggtttccctgatccactccaagtagtggcagactttggtatagacaccaggcttggtggtgttgtcacaagggacgtcaccccaggacacaatgccctgcaggatgcccccacagaccaggggtcccccagagtcaccctgtggggaaaagagggggtctcaggttgagtgaaacctcctggattcatcctcatcctaatcaccatttgcaatctcaccccaaacccaatccatccccatcccagggaaccccaacccaactcaactcaatacagcccagtttatcccaaacagagccaacccaaccccaaccccaaccccaattcaacacagctcaatacaactcacccaacctatatccaatctcacccccatgcaactccagtgcaactgtactaagttaaatccaactcagcccacatcctcaccattcaaaatcaaatcaaacccatgcccatctcaaaatccaatctcaatcttcatgtcttctgcattccaaacaaaatctacctcatcccaattcaaccctgacgtatttcccacccagaatcaaaccaaaccattcccattctcaaccccaacccatgccatctcaaactaactatcacattatccacctcaaacaacgcaatccccacctataaccccaactccaacctcacccctattctaacttctcttcctactccatctccaagcctaaccctagcatcttctctggcccaaagcaaagaaaatccaaccccatccggactcccacacctgtccccatccctcttcttccgcctgatggcccctctaggctctgacctcacaggattctgcgcctctgccctccgcgcctgcacacaccatggtgtttgtcaggcgccctgggtagctcttgtcacaagatgtgtccgagataatgctgatgttggcacaatgcaacgtatctgggagactcactggggaagacagtggacttggagcagatccataaattccggcccttgtcccctccgcccaagagccctggagcataggattccttgaggcctcgcatccagctccatcctttcacgcaccttgtgaccgggggctcccagcggtcccaggctcgttgtgggacaccaggccccagccagacaccacacaggcctcccccgggtgggggcaacgcgtgggtagcaccgcggggcgcacctgggggttcaggcgtgcgggctggactaggcgcagcaacatgatgtcgttgcggtggctgcgcgcttcgtagcgcgggtgtggaatgacccgagacgtggtccgtagttgctctgggccatcgcgcttgcgcaggttgtgctctcccaggcgcactctcatgaagctgtgcgggcgagtggttttcccgccagtggagtgcgggccagtggttacccgcaagtagaggacagaaagatcaaagagtgggcaacccgaggtctcccgaccctttagaaatctcgacatcccattaccttttcccaagaccctgaagccaatggttccagcccctgctcctcaaggaccaacgagtctgaagtcaggcacactcctagaactcgatcccctccaactactcccagccccctcctggtctgtccccgaatccaggattctcacatccctagaactgaggctcaaaagctggaactagtcttctccttcctccttcagagatcgaaggctttgaaacacacactccttcctaacccaggggcttgacatccggcctcctcgtctttcagaacccaggagttctggcgtctgcctccgtcttcccccaaatctaggagctcttccccccgaaccaggctccctcaggaccctgagcccctgccttcataccggctttggcagtgggccgcagacagcacccagtgtggggagatgagggaagcgccacagttaaagcgtccacgctcgtagagagccacttgccatggctgggagtggggtgcacactcgtcaccttccagcaacttgtcaccatcctgggctgctaagagaaggggtagaggatgcctgaggacagggacgtttacattgcctcctacaccttccttgcaccctgccctaactactatatgcctatgcctttcccctaacttctcaagacaccctgccctgtttttgtttgttgttgttgttgtttttgagacggagtctcactcttttgcccaggctggagtgcagtggcatgatctcagctcactgcaacttccgcctcctgggttcaagtgatcctcctgcctcagcctcccgagtagctgaggtgcccgccaccacacctggctaatttttgtatttttagtagagacgaggtctcaccatgttagccagggtagtctcaaacttctgacttcaaatgctctgcccgcctcagcctcccaaagtgctgggattacaggtgtgagccaccatgctccgcctgccctgttgtttatttacaaccgctgcctgttttctccagaactctagcccccaccccatttgctataagactctgggagagagaggaaggggaacagaccagagggcaagaagtcctctgtggttgggggtggagacaggggcactggatacaggttcagacaggtggtcacttgaaaccagtcattcacggtcaccaaattgtcacagacgtcaaacgcatgtggccactcagtatgtgtgacccagccttggccccagagtctggacatgtcagccaaattcagtgtgcagtatgagtcccagatgtggctatacaaggtcatggacatgcatacatgcacatccagcttccacacttaggtacagctatggacaggactggaagctgaaattcacttgcatgcacatgggttgcagcttcaagaatcacagcacaggctgggcacggtggctcatgcctgtaatcccagcactttgggaggccgaggcgggtggatcacctgaggtcaggagttcgagaccagcctggccaatatggggaaaccctgtctctaacaaaaatacaaaaaattagctgggcatggtggcgggtgcctgtaatcccagctactctggaggctgaggcaggaaaatcgcttgaacccgggaggcggagattgcagtgagcggaggttgctccattgcactccagcctgggtgacaagagtgaaactccatctcaaaaaaaaaaaaaaaaaaaaaaaaagaatcacagcacagatgttcatatgtgtatatgaatatggatggttaagacatgaatacatacacacacacacatgcacacacaaacacacacacagaattggatattgttcagacctaaattcaacatctctagtgtgagtcttggcatccagtgtcacagacacttgcatacagggtctggacaaagatgggtccttaagcctgggttcgaatgtactagctgtgaaactttgagtaagttattcgacctgtctgtgcctctgtttcctcatctgtaaaatgaagattgttgtaaggatgaggtaggaatgtgtatgtgtgtgtgtgcatgtgtgtatgtatggtgagtgatacctagccctggtagctacttaataatattagttgttttttgcaaatgacacctggatttagtcacagggacatacgtgtgaaagttcaggtccatcctggagatggccaacataagtcagacatctgcacagaattacctataataaatagtcaaggttggccaggtgtggtggctcacgcctgtaatcccagcactttgggaggccaaggccgaggtgggtggatcacctgaggtcaggagtttgagaccagcctggccaacatcgtgaaatcccgtctctactaaaaaataaataaataaataaataaaaatacaaaaatcagctgggcgtggtggtgcgtgcctgtaattctagctactcgggaggcagagacagaattgcttgaacctgggaggcggaggttgcagtgagctgaggttgcaccactgaactccagcttgggcggcagagcgagactccgtctcaaaaaaaaccaaacaaacaaaaaaaagtcaaggttaaaaccgtgattcacccacaagacattttgtagagttagagctgcagacaccaacccagaaggccaacactcagatgtggacttgctgtctggggcagcacccagacacggggctgggcattcaaggtcaaagacatgcagctgaagccagaggcagccagggcaggacatatttatccatctctagatcagcccccaagccagatctgtggagtcactgattgggtttcacatatggggatctggctcatgcatgtggagaggatgtgaacatacagggccttgtatacccactgcacacgtgcatgtacacacacacacacacacacacacacagaatggcattatgcttaaggacatgattagagacattcaaggtcacaggaccaggacccctctccactgggcaatgtggatgcatcccctgaaggttgaagccatgcacactcccacccacacaggggcaggatttgcacagccagaccaaatgcccacactctccccatcacagtcaggaactgggccaaaggcccccgtgagaccaggggaatgcggatgtggtggacaaggggcttaacaaaggaagggtgaggtcgtcctccgaagggcggagggtacgggctgaacagctgggcaccgaggctgcacctggccagtccaagccagaggaaggtggaggccccagctgggcgcagcaggcaggcgcgaggcaggtaggtgagtgcacagagagagccggaggggaggctggaggcgtgggggtctcaggggcccccaggagtgagggtcatttgtggcagaacgttaatgaaagtccaccccccaatttctccagaagagaggcatcaggttacaattaatttcttggtgtgtggcagctgagttcaatctggagtttgcctgacacccaaggtgaccttgatgttgtggccgtccctctgagccacagccccttcccttgtcaaatgaggtcggtggtgcccaccacacatagacgttgtatgtaagctctaagcaccgtgcctggcttgcacacctgaaggggcactacctgggccaggcttatgcttctgcctcacacacaaccacatttaatcccctcaaagaccctgtaagagacagggagtggcaggtgtgggactcaagctggagtctgtctgtgctgttggcctctcagcacttgtctaatgcttgctatgtatattacctctgttatgctattgagacctcactgttattgtctcaagtgggtgctgtcttatagagaaggcattcgaagcccagagaggtgaagcagttccctcaaggacacacagcaaggaagcggttgccccaggactcagctcaggtttgtgtaaccccaggaccgtgttccttgtcgtgggcagcgagaggccccaggcaacatagcgactccagagcagcagcaccagcacctgacggtaagggcttagggacattggcacaggtggagggtgaaggaaggatctttagtggtctctgggtgaggtaggggctggcagatcactgggcccagacatgcttgggaagggggcacctgctcccacagacctggccccctcctggggccacctcacctgtggatgccagcaggaaggagagagtgaggagaagccacattgtggaggagggaccagggttcggctgcagtctggggagggagtgagagaatccaggtgaggcaggacccttctgcctccaccaggatccctccagacacagacttatcccatccactgttaataaatttcttctgaccaccggtatccccttcccccaaccccactctgcgcttccttctgggtcccccatctctggaaggtttactcttcctctaggcactcggacagaccctgccccacctcctccacctgtcagcctccagcaccatgctaccagcccctggatctctctccatcatcaccaaggacccctgtcccaacttttttttttttttgagacggagtctcactctgtcacccaggctggagtgcagtggcacaatgtcggctcactgcaagctccacctcccaggttcacaccattctcccgcctcagcctcccgagtagctgggactacaggcgcccaccaccgtgcccggctaattttttggaaattttttttttttaagtagagacagggtttcaccgtgttagccaggatggcctcaatctcttgacttcatgatccacccacctcggcctcccaaagtgctgggattacaggcatgagccaccgcgcctggtctatctcaaccctcttatctggccttttgggtccccctccagtccagtcccctccaccagcttgccctccagccatgaccccaaagggtctttctacatctggagctggctgtgcccctcccctgctcaccaccctccatggatccttggcaccaccaggataaagtccagctcttcaaattcactttctttctttttttttcttttttttttttttttttgagacggagtctggctctgtagcccaggttggagtggagtggcgtgatctccgctcactgtaacctctgccttctgggttcaagagattctcctgcctcagcctcccaagcaattgggattacaggtgtgtgccaccacgcccagctaatttttgtaattttagtagagacggagtttcaccatgttggccaggctggtcttgaactcctgacctctagtgatccacccgcctcagcctcccaaagtgctgggattacaggcatgagttgcctggctccagcctcactttcaaggacaaaagtggcttcttcccttccagcccctctccctgggtctcccatgaccttgtcctagacgcagccagtgctgccattttccctcctgccatttcatgcttaggctattcctcccaccgcatatccaacgccattcccttccagccccgcttcctccttgaggccttctctgacctcccctgaccctcagtggtgtctgcctcccctacgagactggcagctccccgaggagctggtctgactccactctgggtctccagtactgcagggcccgacccacgggaggcctcaggaagctttgagggtgaattgaaatccttcttccccatatcttccaaattcatctttgtcctctgacactctgcccccacctcttctgggaggccccaacacctaacaggtgtctcccctgaatcccacagcacccattctgtctccattacagcgcagatgccccatacttgctgaggtctggcctgttcttttctccatctgggggtcttgaagatggggctcaggtcaggttctttctgtgacctcagcactgccccacctggggcctggtacacaggaggcctccgggaggttgtgctgaactgacttgaacccgtgatcactcctgaccacgttcttggctctgatacaagtacttcagggacgtcctcctgatccactccatccccctccctccccaccactgcagctccttctggccattccaggacattttcttggttcaggttcaatttggggcattggtaaaggacacgtggatctacccatgcccttgacactcagttctccaagcgtggtcaacgtttccccttgaaaccagggcacagtgaatctcccctttgcccctccctcagtcttgtctcaaagctctcacctcctccagatcctccagcagcatctagggcagcttgggtgccagaagggagcaggtaccaggatgcctgaatttataagctcccagtcccagctgggtctgggggtgtggtggtgtagggtggggtgggaggtggctgagagtcaggtttacaggcagagacgccttggttgctggtggggtgggagacttggcctaatgagcatttattaggttgaagctgttgtctgagtccacaaagaggaattctccaccaggagcagttcctcaagggggaggggacaggaggacaaaaacagaaattaggaggagatcaaaagacagagtctggaatttggggtctggagtgtggaaactggatcctaaagtccctgttcttgggcttggggcagagttctggatcccgggttctggatccggatctggttctggatctgggtcttggattctggatttgaggatcttgagttggagattaatgacctgcagtctggaatatggatttcaaagtctgagttcttgggctgggggtctggaatctggatcctggagtcgggcctttgagtgacagatcgtgaaccttgattctggatcccggggcattcgaatctagaacccacaataggagcctggaatctggtgtttggaatctggcaatcgaggctggaaacctttgcacctgctatgagaagcctggggcctagactacaaatggtagatttgggattttgaattgtggggtctggattctttttttttttttttctgagatgaagtttcgctcttgtcacccaggctggagtgcaatagcgtgatctcagatcactgcaacctccacttcctgggctcaatagattctcctgcctcagcctcctgagtagctgggattacaggcgaccaccaccacgcccagctaatttttatatttttagtagagacagggtttcaccatgttggccaggctggtgtcgaactcctcatctcaagtgatccacctgactcagcctcctaaagtgctgggattacaggcgtgagacaccatgccaggcttggggtctggattctacagggtggatctagcctctgagctttcaggagtagactttggaacatacagtctggagtttcaaatctgtttttgcattgaaaacctggactgtggctgggcccagtgactcatgcctttgggaggctgaggtaggaggattgctggaactgaagggtttgagaccagcctgggcaacacagcaatacctcatctctatgaaaaatctaaataaataaataaataagtaaataaatttttaaaaggctgaattgagagacagggacctggctttcacgattctgagattgctagaatcttgactctagagtctgaatttagagtctgggaacccagggtctctattctggtcctgtagtcttatttctgggttctagagcttgaaatctggattctgcatcccagaggctggagatgatcactgagatgacccaaggctttgggtatttgaggctggcttccaatgtctcagaaccccagagggccccaagcaattatctagagtctattttggcttaattaatgaggaggtcccaagacaggagggactgacctcactcaggtcacccagtgaaggatgggacctgttgtaagcgtggtctctccccatgtgtggaaagtcatcatctttatgggaaggattcagccattctagaactacaggcccctggaatttctagaatatcagactttcagattctaaaagcacaggccctaagacattctggcagtggaggacactctggaaggtaagattttagaatagcctagaaccacagagctccaaacactctagaaccttcgaacatcgggcactctggagtccccagaaacctcatgcattctagaacgtcgggtctccagacattctacaagcccagaccggcagacataatagatccccaggttggaagctattctagaactcctatgtccctttgcctccctccccacaaattgatgctcaaagtctgcgggcctcaccctgggccaccgcttcagctgagcagccctgtttatggaatgcggctgcaggccactcctccgtgccaagtgctctctttgtaggatctcactccggctcccggcagccctgtgaggtgtttatattaataaccttatggcttcctgctgaatacggaggaaactgaggcccagacaggaggcagcacaagcaaggttcctgcagaagcgagaggccacgcgggagaggaatcagtgttccgactccggaacgcccggtgggccctttcgccgccacccctgcagccgcctccctctgttggggcgcggtggtgacgagggaaaggagccgagcccctgggacttcctcggtgccaggtctgtgctgagcgcttcccgtcacgatcgcacgtgctcctcctcctaaccagcctaggcaggtactgatgaagcacccctgatacagacggggacactgagggcgctcccgccgcgccgaacccaggcgcgcacccggtctgcgctcggctccctggagggcgcgcagccagcggctcccgcagccccgcccccacgcggtgacgtcggcgccccgtccccgcccactgtgtctggctcaggctcgcgcgatcgatgtcctcctggacgtgtccgcggacgtccttcacctccaccgcggcctgggtcccgcccaccgcggcctgagtctcacttttgcccggctcctcctcctgagaacgttccctgggagtttttcatcaactcccgtggttcatccaccaaccacgcaggtctcctccatctgaccctgaactccggcttgggcagccacctgctcctgggcgccccctgcaccactgtccctaggcccctctcacttaccgagtcccaactcattgctctatttccccaaaccctccttccctgttcttccacgttcttcatctcaggggcagcgtcaccgaccacccagttattcggccagacgcccttggcactgaccttgccccatctctccccttatcccctacagcccatcggtccccagccttgtcccttcggcccctgcctctctctgccccgtcccctcctctctgtccccttggcctggctccagctcagacgtcctcctctctctctggaccctcgctcctcctgtccgggaggacagcctcctgtcggtcaccacgtggccctagagggtctctctgcacttggagatcaccccgcccctcccctgctcacagccttcccttgcagctccccatcacccctgggcaaggtcccggcttctcggtctgcagttttaagccctttgagattccccagcaggaaaaagcctcccctcaaacccccttctcagggggcctgcagactgcccacctccggagcgggactggactcgtggtgcccgaagggcctccccatgaggtgctggccctcttctaacttagtctcaccacggcctccgttccttctggaaccagacaagctgctgtttcagggcgctgggtctggatccagacagcatgggtgcagatctctgttccactacttactattttgggagaccctggtaagagttttttcttctctgtgtctcagtttcttatccttaaaatcagaggatcccctcgtagagtttttcgaggagtaacgacttagtttgtgttaggagctcagagcatatagtaaattatgacgattcattcatttaacacatgagcagacgggagtgcgggggtcactggtgaaggtcacccaggctgcagaagtggaatcaagagaatggttctcggggtcctggtgccccttgtgagaagcatcagctctctgggtgtcaggtgctcatctgcgaaggggtcttccgttgcggtggggtggaaatgggagggacctcacaggggttggatgaggtcatacccatggagcaggtgtgcgaatcataaaatcaggctgaggcttgcaagaccggttaacacggcacgtgattcagatgtagccgctggagccaggtggcccgggtttgagttctgcctctgtcccataatactgtgcaccctcaggcaagtcacttagcctctctgtgcctcagctgcctcaactataaagtgggggtaataattgctcctccctcttctgtgggagtgttttgaggtgttcattcttgaaatctgtgcccggcactgagtgagtgctgggccattatcagtctgtcctattacccttgggaactgaaagctggggagggatggttatgtggggtctttctcagatgacacagttgggtagcagcagatttggcactggaagaagccactgtgctttttgttttgttttgttttctgttttttgtttttttttttttttgagacggagtctcgctcttgttgtccaggctggagtgcaatggcatgatcttggctcactgcaacctccgcctcctgggttcaagcgattctcctgcctcagcctcctgagtagctgggattacaggcacccaccagcacagccggctaatttttgtatttttagtagagttggggtttcacagtgttggccaggctggtcttgaactcctgacctcaagtgatccacctgccttggcctcccaaagtgttaggattacaggcgtgagccaccgcgcccagccagaagccactgttttgatctcccagatgtggtatctttttctgaatccctgtgacccctttatcaagacccctgttttacagatgggggaactgaggcccagggagaggaaatggaggtgtgagaccctggtatgagagtgtgacgtcaagcaaagagaatgtcacacgcagacgagttcttctctgagactttatttcctgggctgtgctgggggaagctggaggggaggaggcagaaaaacccacatcttctcttcttttgtcctgggagggccttaccgataggtggcatcaattgtgcgtttgttcatagcagttttactcctgggtctgagggaggaggggctgggggcctggactcctgggtctgaggagggagaggctggtgcctggactcctgggtctgagaaaggagaggctgggggccgggactcctgggactgagggacgggtggctggtgtccaggactcctgggtctcaaggaagaagggctggggggtctgagggaggagggggctggggactcagactcttgggtccaagggaggagcggctggggtctggactcctgggtctgagggaggtgggactgagggcccggactcctgggtttgagggagaaaggcctgggggatctgagggaggaggggctagggtctgaactcctgagtctgagggaggtggggctgagggcctgcactcctgggtctgagagaggaggggctggggggtctgagggaggaggaggctggggggtttgagggaggtagggctggagtctggactcctgggtctgagggaggaggggctgggggcccgcactcctgggtctgagggagctggggctggggaggtctgagagaggtggggctggggggtttaagggaggtggggctggagtctggactcctgggtctgagggaggaggaggctagggacccggactcctgggtcggtgggaggaggggctggggcatcttagggaggtggggctggggcctggactcctgggtcctgcactctggggctgggagagaaaggcctgccctgcctgcgtctccctctctgtgttccacccccacccatagacctcttcgctagagtcctgagcccccagcccactttccagctccctcctcttccctttctggaagcttcccttctgcgtttgttcataggaggtttgctcttgggtctgagggaggaggggctggggtcctgagctcctgggtctaaaggaggaggggctggggagtctgagggaggagggaggtggaggcccagactcctgggtctgagggaggagaagctggtgcctggactcctgggtctgagagaggagaggctgggatctgggactcctgggtctgagggaggaggggctggggtcctggactcctgggtctgaaggaggaggggctggggggtctgagggaggagggagctggggagacgtgtgtcttctccctcccgtgactcctgctcactttccccatgtctgtgtttctgctcccctctccccgtgatcctgtcagcttcttttagtttttattttttagagttggggtcttgctctgttgcccaggctggagtgcaatggtgcaatcatagctcactgctacctcaaactcctgggtttaagcgatcctctggtatcagcctcccgagtagctgggactacaagtgtgtgccaccatacctggctaatttttacgttttgtttttttttttgtggagatggggtcttgatatgttgcccaggctgagattgtaaaaagtcatcatggaacaccccacctcccagtgcaggaaagctggctgtggtattgccaagaatgatgtttattgcagcactattcccaatagctaagatttagagacaacctaagtgtccatcaacaaatgaatggatacagaaaatgtggtacatatacacagtggaacactattcagccatcagaaagaatgagagcctgtcatttgcaacatggatggaactggaggttatgatgttaagtgcaataagtcaggcacagaagataaacttcacaggttctcatttatttttgggagctaaaaattgaaacaattagccgggcactcacacctgtaatcccagcactttgggaggctgaagcaggtggatcacctgaggtaaggagttcaagaccagcctggccaacatggtgaaaccctgtctccactaaaaatacaagaattagccaggcgcagtggcgcgtgcctgtattcccagctacttggaaggctgagacacagaagtgcttgaacctgggaggagggggttgtggtgagccaagacctctccagtgcactccagcgacctgggagacagagcgagactccatctccagaagcctggagaaatagggacaaaaaacaaaaacaaaaccaactgagttaatggagatagacagtagaagcatagttatcagaggctggggagggtgagggtatgtgggtagtggggaagtgcggatggttaatgggtacgaggaaatagaataagatctagtattcgatagcacaacagggtgactgtggtcaataataatttaattgtacatttaaaaacaacaaaaagaatataattagattgtttgtaacacaaagggtgaatgcttgaggtaatggataccccatttaccctcatgtgattattacacattatatgcctatattaaaatatctcatgtaccccataaatatatccacctgctatgtacccacaacaattacaaattagcaaaaaaagaataatgtggctcttgccaggtttcagctccacccttgctgtgtgtgtggcgcgttgcgtccccaggtccctctcagtggtccgtggagagcattaccacctgtcactgtctactatctcagggcagaccctctctcctctctcttcctccatctctgcaccccacaaataaagtggcaacccccccgatgtgtgtctttgcagaacctgaatgtgatgagattgccagaaaatgccagtgtgcccctggatgggtggaggagggtggggcgggtggaggggacaactttgccccattggggaaccactgggctatacctgtcactgaagcttcctttctcccctgcacctgactccacacctcaggacgcaggtcaggagggctgggggatgctctagccttggccaggtgggcctggagatgattgttcactgcaggagcattcacctttttagatgggtgcttcctgtctagagaaggagacacggggagctggaaagagaagcctgcagaaatagggaccgggcaaaaacaaaggagggtggagtcggggagtgtagaagagataaagtaaggactggagtgaggaagaggcatcaaaagagggagggaatggtgaaggcagaaaaccgtgagaaacggggagtgagaagatagcatgagaaagacaggatcaagtcaggcgtggtggctcacgccggtaatcccagcactttgggaggctgaggcgggcggatcatttgaggtcaggagtttgagaccagcctagccaacattgtctctactaaaaatacaaaaattagccaggtgtggtggtgtgtgtctgtaatcccagctactcaagaggctgaggcaggagaatcgcttgaacccatggtggggtggaggttgcagtgagccgagatcgcaccactgtactccagcctgggtgacagagtgagactctgtctcaaaaacaaacaaacaagcaaacaaaaaaaccaggtaaactgaggctgggttttgtatcccagaccaaatgcctgcactttgaatgcctggttgggaagcctgagattatcctgtagggaagcatcgagagcatgaactgaatggtgttaggagacaattatccatggctctcttacctttctgcctgtctcctgaaaaaggtattagccacttttgagttccagattgtctttttatggatgtttctctagagcatcagagcatgtttgttcactgtcttagataataaagataatgtccttccataatgatttatttattggctaggatagtaaatacaacatgtccttccggggcaggtggatcagcagtccgacataacaaagataatatctctccgagtttcaaagtcaagcagatttccttgcatctcccttataagattgaagatttgtaaatacatgtaaacagaggttccccagcattgacgcaaaccactgtgtgcgcagcatctgcctgagccactctgatcatccctgtaggacctggggggcaaggtgagcccatgtgaacatgaatctcatgctgccggctgtgccatgagtaataaagtcctttgtctctgacccggagttgttgtgtgttctgccaatagtttcactggatacaaaattcttggctgataattgttttgtataaggaggctaaagacaggaccacaatcccttctaggttgtagggtttttgctgagaaatctgctgtcaatctaataggttttcctttataggttacctgatgctccttcatcttgactttagataacctgatgactatgtgcctaggggggtcatcttttttttgttttgttttgttttgagatggagtctcactctgttgcccaggctggagtgcagtggtgcgatttcggctcactgcaacgtccgcctcccgggttcaagagactcttccgcctcagcctcccgagtagctgggattacaggtgcgtgccaccacacccggctacttttttatatttttagtagagaaggggtttcactgtgttagccaggatggcctcgatctcctgaccttgtgattggcctgcctaagtctcttaaagttctgggattacaggcgtgaacgactacgcccgaccagtggtcatctttttgcaatgaatttcccaggcgttctttgagcttctcatgtttggatatctagatctctagcaaggccaaggaagattattcccctcaaatatgttttccaaacttttagatttatcttcttccttgggaacatgaattattcttaggttggttgtttaacataatcccaaacttcttggaggtcttgttcattttttaaaaatacttttttctttgtctttgttggattgggttaatccaaaagtcttgtctttgggctcttaagttctttcttctacttgtttgattctattgctgagactttccagtgtattttgcatttctctaagtgtgtccttcatttccagaaattgtaattgtttttgatttacgctatttctctggagatttttctgtccatatccggtaacactttttaaaatttctttaagttggtattcacctttctctggtgccttcttgagtagcttagtaattgatcttctgattttttttttttctggcaatttcagagatttctttttggtttggatccattgttggtgagctggtgtgatctttttggcgtgttaaataaccttgttttgtcgtattaccagaattggttttctggttccttctcctttgtagactatgtcagaaggaagatctgggtctcaagggctgctcagattctggatttagctacccagtggagcgtctgcgctctgggctggtactggggggtgtctgcaaagagtcctgtgatgtgattcatcttcaggtctcttagctgtggatatcagcacctgctccgttggaggtaacagaggagtaaagtagactcgctggggttccttggttgtattattttttagtgcgctggttttgtgttggttggcctccagccaggagacggcactttcaagacagcatcagctgcagtagtacagggaggaaaacagcttgccctagggttacctggataagtattcaggtttctcaggtggaggatggggccagatagcttccaagagagtatgtccttcgtctttggctactagggcaggtagaggaacaccatcaggtgggggcagggttaggggtgtctgagttcagactctccttgggtaagggtcgctgtggctgctgtgtgggggtggggtgtggttctcaggccaatgaggttatgttcccaggggaattatggctgcctctactgcatcatgtgggtcaccagggaagtgggagaaagccagcagtttcagggctcacccagctcccatgcagcccaaaaagctggtctcattcccactgtgtgcatccccaatcaatgcacagtttgtttgcaggcagcaggtgcgcagggctgggaactcgccccaggctacaagcctccctgctgagaaagcaagcagggctttcaggtttcgtgcctccccacctgctgcagcttctgtgctcatgtctgcactcacagttcaccccctcccctgagttctgtccaggaaacttcgtgttcagttgaaattgttgcaaagttcagctggaagcttccttctccctgtagtctttccccaattccgttggcagccctccccaaggacccctgtgagatgaagtcagaaatggcttccctggggaccaacagtaccctcagggctcttcctgctgctttctctaccccccgtatttcattcagctctctaagttcatctcggctccaggtaaggtcaaatccttctcccatgatctggaccttcagattccccagtgaggatgtgtgtgcaggggcggatgatccccccttcacacttttcacactttgagcactcacagtttttcagctgtctcctggagcctgcagcagcaatgtgcttccttcaaagggtctgtgggttctcttggctttcctggtatgttcctgcagtagttcttggagcaaaaattcaagacgtgagtctccacatgctgctctgtccatctgagtgggagctgcaagttagtcctgcttcctagccaccattttctccccacattagctttttgacttttctttatatatatatatatatatatatatatatatatatatatatatatatatatgtttgttttttttaattatactttaagttctagggtacatgtgcacaacgtgcaggtttgttacatatgtatacatgtgccatgttggtgtgctgcacccattaactcgtcatttacattagttatatctcctaatgctatccctccccccacttgacttttcttttttattaattgcctgttcatatgctttgtccatttttttaggggttgctctcttgttcatgtcagaagtttcttgtgccttctaaatggtgatctctttttggttttgaacattgtataagtcatcttttataaatagaaattctgaattcttatacaagtttctggatgacagtgccctctaagcaaaaattctaaattttcctataatgaagtacatccaaattttggtctatgatttgtgcttctgaagttgtgtcaagaagccttttctttgtgttagataacaaaggttatctctcatattttctagcctctctaaccctctctgtttgtccatctgtttctgtatctcatcccatctatatagctattcattaatttctcatttaactgatatttgctagttgtcacaactgtgacttgatgaagataacataaactcataataatatccctcaataagaaaaggaacgataaactagtgtcattagcttataaaccgtgttagattaattggtggatcagaacacttgaaatgtcctgaaatctttcagctgacatttgaaagaaacttactattatttctccccaaattgggcaagaatcctagacaaatcatatgaaatttaaataaataaaagctttgaagctgaaagaaatgtttctaaaggattaataatgaaaaacagattttgatcaaatatgataaaaatgaaattatttttcttcccctagaaaatgagattacaggccgggtgtggtggcttacacttgtaatcctagcactttgggaggccaaggtgagcggatcatgaggtcagtagttcaagatcagcctggccaacatggtgaaaccccgtttctgctaaaaaaaaaaatacaaaaattagccaggtgtggtggcatgcgcctgtagtcccagctgctcgggagactgaggcagaagaattgcttgaacccgggaggcagaggttgcagtaagccaagatcgcaccactgcactccagcctgggcgacagagcgagactctgtctaaaaaaaaaaaaaagaaaagaaaaagaaaatcagattacaaaatcatttgatgataagcagagataactgaagagtatgaggacaaaagaatgtaggagaagaactttataaggcatttaagacaattgctaaattaaaaaattccacatcttctaaattttgcattgattttggtactgtatactcttttgaatagttcccgtattattccttttatcatttagattcgctatttacatttgttatttcttttcccattagattaatctgggttatacctaagtttatattaagaatcttttattctttttttgtttttaagaagctgaagacctcagaaaacctgatcaacatgaaatatggtatgaagtagtactcaataaagagaaaacatgatggtaatcttgaagaaaagcaccatattcatctctgtatgtccttctgtgtccctctctgtccctgggggagggcctctctgaccatctcaggctgttatagtggagattctggaactctggagtggaaggattcctgagacctttctgggggtatgcgaggtcaaacactagtttcataataatctgtacacattatttacctttctcactcttttttttttttttttttttttttttctgagatggagtttcactcttgttgcccaggctggagtgcagtggcacaatctcagctcactgcaacctctgcctcccgggttcaagtgattctcctgcctcagcctcccaagtagctgggattacaggcgcccgccaccacgcctggctaatttttgtatttttagtagagacggagtttcaccatgttgtccaggctggtcttgaactcctgacctcagatgatccgcccgccttggcctgataaagtgctgggattacaggtgtgagccaccacgcctggcacctttctcactcttattctctcacaagcacaaggtggaattttccagagcctacatgctgtgatattgtagcaaattaaaccctgaagcagatatgagagtccagctgccttctattaagccagacattaaagagacttgcaaaagtgcataacattttttctcactagtttttttcttaaaatatagctatttttcattaaaatacattatgttaacatatttattattgttatttaaaaataaattaataactgaatattttaaagatttctcagttttaatatctactgtggtatcaatagatatagttaatataaacaaaaacccatgaaaggccttcagtaattcttttgttttgtttttttttttcgatggagttttgctcttgttacccagggtagagtgcagtggcacaatgttggctcactgcaacctttgccttcccggttaaggtgattctccagcctcagcctcctgagtagctgggattacaggtgcctgccatcacgcccggctaatttttgtatttttagtagagatggggtttcaccgtgttggccaggctggtctcaaactcctgacctcaggtgatctacctgctttagcctcccaaagtgctgggattgcaggcgtgagccaccatgcccggcccaataattcccttttttttttttttttttgagacggagtcttgctctgtcaccaggcaggagtgcagtggcacgatctcggctcactgcactctctgcctcccaggttcaagtgattatcctgcctcatcctcccgagtagctgggattactggtgtgtgccaccacacccagctaatttttttgtatttttagtagaaacaggatttcaccatgttggccaggatggtctcgatctcctgacctcgtgatctgccctcctcggcctcccaaagtactgggattacaggcgtgagccacagcgcctggccccagcccaataattcttaagagtgtaaacatgtcctgagatggcaaatgtttgagaaccaccgttctagacattttcctgaattctagagtgtgggagtgtagaacctggagcttggcttctggagcctagattctggaatttggagctgggatctgaggcttggctgcagcagtgtggggctggcttccggaacacagatctgacatgctcatctgctgcgtggggtttactatctgccttgaatcctaaagtctgcccctgaggagtctggaatctggaatctattatctttagttgaacacctgcagtctgcgttctgctttgcagagctggattctttacccgtgatccgttctggcatttcaacttcacacagaataggccacttcatggtactgttttcaaccaatcaagcaaattaatcgttagagccctttctaattcctctagttgcaatgttaaacccaatatttctgtgtagtgggtccatattaataaattcagcctgatctaaccttatattccttccaccattattccataccaacccttaatatgcattcccacatatatttcctggatttctgtctatataatgggcaatcccggctttgccagtttctagtgacctaacatctctgtgactcatgttattgtactttaaagtggaaataataacagttcctgtacagtttagggcttcccaagatgaccctccattgacatcagttgagattccaggagagtccaaaagatcatccttaaggttcagtcgtttgctaggatgctcatggttgtggtttattacagcaaaaggatacagatgaaaatctggcaagggagaggtgaatgaggcaaagacaaggagaactcaaagtgcgaagcttctagttttcttttcccggtgacatcgtggaaagcactagcatctctaagcaatgatctgtgacaatattcacagtgtattgccatccagggaactcaactgagccttgatgtccagagatttttgtgtttttttctgagactgagtctcgctctgtgcccaggctggagtgcagtggtgcaaccttggctcactgcaagctccgcctcctgggttcacgccattctcctgcctcagcctcctgagtagctgggactacaggcacccgccaccacgcctggctaatttttttgtatttttagtagagatggggtttcactgtgttagccaggatggtctcagtctcctgacctcgtgatctgcccaccttggcctcccaaagtgctgggattacaggcgtgagccactgcgcctggccgatatccagagattttttggggggctccatcacacagacatgttgactgtcttcatggttgacttttagtatccagcccctctagaaatctagctgatatagtgtggctcaaaaccttcagcacaaatcacaccgttagactatctggtgtggcccaaaccttcaggtgaacaaaggcactctaaactggcaggatattccaaagcattagagatgacctcttgcaaagaaaaagaaatggaaaagaaaaagaaagaaaggaaaaaaaaaaaaaaaaagagatgacctctcaggctctgaggggaaacgcctgaggtctttgagcaaggtcagtcctctgttgcacagtctccctcacagggtcattgtgacgatcaaatgtggtcacgtgtatgaggcaccagcacatgcctggctctggggagtgccgtgtaagtgtatgcttgcactgctgaatggctgggatgtgtcagggattatcttcagcacttacagatgctcatctcatcctcacagcatcactatgggatgggtattactggcctcatttgatggagaaactggctgtggctcagaaaggggggaccactagaccagggacactctggatgctggggactccagagaccatgaccactcaccaactgcagagaaattaattgtggcctgatgtccctgtcctggagagggtggaggtggaccttcactaacctcctaccttgaccctctcttttagggctctttctgacctccaccatgatactaggaccccattgtattctgtaccctcttgactctatgacccccactgcccactgcatccagctgggtcccctcctatctctattcccagctggccagtgcagtctcagtgcccacctgtttgtcagtaactctgaaggggctgacattttactgacttgcaaacaaataagctaactttccagagttttgtgaatgctggcagagtccatgagactcctgagtcagaggcaaaggcttttactgctcacagcttagcagacagcatgaggttcatgttcacattagtacaccttgccccccccaaatcttgtagggtgaccagagcagtctaggtggatgctgtgcacacggggtttgtgccactggtgagaaacctgagattaggaatcctcaatcttatactgggacaacttgcaaacctgctcagcctttgtctctgatgaagatattatcttcatgatcttggattgaaaacagacctactctggaggaacatattgtatcgattgtccttgacagtaaacaaatctgttgtaagagacattatctttattatctaggacagtaagcaagcctggatctgagagagatatcatcttgcaaggatgcctgctttacaaacatccttgaaacaacaatccagaaaaaaaaaggtgttgctgtctttgctcagaagacacacagatacgtgacagaaccatggagaattgcctcccaacactgttcagccagagccttccacccttgtctgcaggacagtctcaacgttccaccattaaatacttcttctgtcacatcctgcttatttatgcctaaccaaggttctaggtcccgatcgactgtgtctggcagcactccactgccaaacccagaataaggcagcgctcaggatcccgaaggggcatggctggggatcagaacttctgggtttgagtgaggagtgggtccaccctcttgaatttcaaaggaggaagaggctggatgtgaaggaactgggggagggaaagtgtcagttccgaactcttaggtcaatgagggaggagactggtaaggtcccagctcccgaggtactgatgtgggaatggcctaagaatctcatatcctcaggaagaaggtgctggaatcctgaggggtagagttctgggtatatttgtggcttaaggctctttggcccctgaagggcagaggctggaaccattaggtccagggtttggggtgatagtaatgggatctcttgattcctcaagagtctgaggatcgagggttgcccattcttccatcttgccacctaatccttactccacttgagggtatcaccagcccttctagctccatgaaggtgcccctgggcaagcacaatctgagcatgaaagatgccccagaggccttgggtgtcatccactcatcatccagcatccacactctgagggtgtggccagcaccatgacgtcatgttgctgtgactatccctgcagcgtgcctctccagccacctgccaaccgtagagctgccgacatcctcctctggtgggagtggcctgcatggtgccaggctgaggcctagtgtcagacagggagcctggaatcatagggatccaggactcaaaagtgctagagaatggccatatgtcaccatccatgaaatctcaagggcttctgggtggagggcacagggacctgaacttatgggttttccccaagtctattgctctcccaagtgagtctcccagatacgaggcactgtgccagcatcagccttatctccaccacatcttgtaaaagggactacccagggccctgatgaacaccatggtgtgtacaggagtagggggtggaggcacggactcctgtgaggtcacagccaagggagcatcatcatgggtggggaggaggcaatggacaggcttgagaacggggatgtggttgtatttggttttctttggttagataaagtgctgggtataggattgagagtggagtatgaagaccagttaggatggaggatcagattggagttgggttagagatggggtaaaattgtgcttcggatgagtttgggattgacactgtggaggtggtttgggatggcatggctttgggatggaaatagatttgttttgatgttggctcagacatccttggggattgaactggggatgaagctgggtttgattttggaggtagaagacgtggaagtagctgtcagatttgacagtggccatgagttttgtttgatggggaatcaaacaatgggggaagacataagggttggcttgttaggttaagttgcgttgggttgatggggtcggggctgtgtataatgcagttggattggtttgtattaaattgggttgggtcaggttttggttgaggatgagttgaggatatgcttggggacaccggatccatgaggttctcactggagtggagacaaacttcctttccaggatgaatccggggaagccttaattcacgtgtaggggaggtcaggccactggctaagtatatccttccactccagctctaagatggtcttaaattgtgattatctatatccacctctgtctccctcactgtgcttggagtttacctgatcactcaactagaaacaggggaagattttatcaaattctttttttttttttttttttttttgagacagagtctcactctgttgcccaggctggagtgcagtggcgcagtctcggctcactgcaacctctgcctcccaggttcaagtgattctcctgcctcagcctcctgagttgctgggattacaggcatgcagcaccatgcccagctaatttttgtatttttagtagagatggggtttcaccaatgtttgccaggctggcctcgaactcctgacctggtgatccacctgcctcagcctcccaaagtgctgggattacaggcgtcagccaccgcgcccagccacttttgtcaaattcttgagacacagctcgggctggatcaagtgagctactctggttttattgaacagctgaaataaccaactttttggaaattgatgaaatcttacggagttaacagtggaggtaccagggctcttaagagttcccgattctcttctgagactacaaattgtgattttgcatgccaccttaatctttttttttttttttttaaatcgaggtttcagtctcattctatttcccaggctggagttcaatggcgtgatcacagctcactgtagccttgaactcctggccttaagagattctcctgcttcggtctcccaatagctaagactacagtagtccaccaccatatccagataatttttaaattttttggggggccgggcacagtggctcacgcctgtaatcccaacaccatgggaggctgagatgggtggatcacgaggtcaggagtttgagaccagcctgaccaacatggtgaaactctgtctctactaaaaaaaaaaaaaatagaaaaattagccgggcgtggtggcacacggcacctgtaatcccagctactgaggaggctgaggcaggagaatcacttgaacccagaaggcagaggttgcaatgagccgagattgcgccactgcactccagcctgggtgacagagtgagactctgtctcaaaaaaaaaaaattttttttttttttttgtagagatggatcttgctttgtttctctggttggccttgaactcctggcttcaagtgatcctcctaccttggcctcggaaagtgttgggattacaggcgtgagccaccatgactgacctgtcgtttaatcttgaggtacataaacctggctcctaaaggctaaatattttgttggagaaggggcattggattttgcatgaggatgattctgacctgggagggcaggtcagcaggcatctctgttgcacagatagagtgcacaggtctggagaacaaggagtggggggttattggaattccacattgtttgctgcacgttggattttgaaatgctagggaactttgggagactcatatttctgggctagaggatctgtggaccacaagatctttttatgatgacagtagcaatgtatctgtggagctggattctgggttgggagtgcaaggaaaagaatgtactaaatgccaagacatctatttcaggagcatgaggaataaaagttctagtttctggtctcagagtggtgcagggatcagggagtctcacaatctcctgagtgctggtgtcttagggcacactgggtcttggagtgcaaaggatctaggcacgtgaggctttgtatgaagaatcggggatcgtacccaccccctgtttctgtttcatcctgggcgtgtctcctctgcctttgtcccctagatgaagtctccatgagctacagggcctggtgcatccagggtgatctagtaattgcagaacagcaagtgctagctctccctccccttccacagctctgggtgtgggagggggttgtccagcctccagcagcatggggagggccttggtcagcctctgggtgccagcagggcaggggcggagtcctggggaatgaaggttttatagggctcctgggggaggctccccagccccaagcttaccacctgcacccggagagctgtgtcaccatgtgggtcccggttgtcttcctcaccctgtccgtgacgtggattggtgagaggggccatggttggggggatgcaggagagggagccagccctgactgtcaagctgaggctctttcccccccaacccagcaccccagcccagacagggagctgggctcttttctgtctctcccagccccactccaagcccatacccccagcccctccatattgcaacagtcctcactcccacaccaggtccccgctccctcccacttaccccagaactttctccccattgcccagccagctccctgctcccagctgctttactaaaggggaagttcctgggcatctccgtgtttctctttgtggggctcaaaacctccaaggacctctctcaatgccattggttccttggaccgtatcactggtccacctcctgagcccctcaatcctatcacagtctactgacttttcccattcagctgtgagtgcccaaccctatcccagagaccttgatgcttggcctcccaatcttgccctaggatacccagatgccaaccagacacctccttcttcctagccaggctatctggcctgagacaacaaatgggtccctcagtctggcaatgggactctgagaactcctcattccctgactcttagccccagactcttcattcagtggcccacattttccttaggaaaaacatgagcatccccagccacaactgccagctctctgattccccaaatctgcatccttttcaaaacctaaaaacaaaaagaaaaacaaataaaacaaaaccaactcagaccagaactgttttctcaacctgggacttcctaaactttccaaaaccttcctcttccagcaactgaacctcgccataaggcacttatccctggttcctagcaccgcttatcccctcagaatccacaacttgtaccaagtttcccttctcccagtccaagaccccaaatcaccacaaaggacccaatccccagactcaagatatggtctgggcgctgtcttgtgtctcctaccctgatccctgggttcaactctgctcccagagcatgaagcctctccaccagcaccagccaccaacctgcaaacctagggaagattgacagaattcccagcctttcccagctccccctgcccatgtcccaggactcccagccttggttctctgcccccgtgtcttttcaaacccacatcctaaatccatctcctatccgagtcccccagttcctcctgtcaaccctgattcccctgatctagcaccccctctgcaggtgctgcacccctcatcctgtctcggattgtgggaggctgggagtgcgagaagcattcccaaccctggcaggtgcttgtggcctctcgtggcagggcagtctgcggcggtgttctggtgcacccccagtgggtcctcacagctgcccactgcatcaggaagtgagtaggggcctggggtctggggagcaggtgtctgtgtcccagaggaataacagctgggcattttccccaggataacctctaaggccagccttgggactgggggagagagggaaagttctggttcaggtcacatggggaggcagggttggggctggaccaccctccccatggctgcctgggtctccatctgtgttcctctatgtctctttgtgtcgctttcattatgtctcttggtaactggcttcggttgtgtctctccgtgtgactattttgttctctctctccctctcttctctgtcttcagtctccatatctccccctctctctgtccttctctggtccctctctagccagtgtgtctcaccctgtatctctctgccaggctctgtctctcggtctctgtctcacctgtgccttctccctactgagcacacgcatgggatgggcctggggggaccctgagaaaaggaagggctttggctgggcgcggtggctcacacctgtaatcccagcactttgggaggccaaggcaggtagatcacctgaggtcaggagttcgagaccagcctggccaactggtgaaaccccatctctactaaaaatacaaaaaattagccaggcgtggtggcgcatgcctgtagtcccagctactcaggaggctgagggaggagaattgcttgaacctgggaggtggaggttgcagtgagccgagaccgtgccactgcactccagcctgggtgacagagtgagactccgcctcaaaaaaaaaaaaaaaaaaaaagaaaagaaaagaaaagaaaaggaagtgttttatccctgatgtgtgtgggtatgagggtatgagagggcccctctcactccattccttctccaggacatccctccactcttgggagacacagagaagggctggttccagctggagctgggaggggcaattgagggaggaggaaggagaagggggaaggaaaacagggtatgggggaaaggaccctggggagcgaagtggaggatacaaccttgggcctgcaggccaggctacctacccacttggaaacccacgccaaagccgcatctacagctgagccactctgaggcctcccctccccagcggtccccactcagctccaaagtctctctcccttttctctcccacactctatcatcccccggattcctctctacttggttctcattcttcctttgacttcctgcttccctttctcattcatctgtttctcactttctgcctggttttgttcttctctctctctttctctggcccatgtctgtttctctatgtttctgtcttttctttctcatcctgtgtattttcggctcaccttgtttgtcactgttctcccctctgccctttcattctctctgtccttttaccctcttcctttttcccttggtttctctcagtttctgtatctgcccttcaccctctcacactgctgtttcccaactcgttgtctgtatttttggcctgaactgtgtcttccccaaccctgtgtttttctcactgtttctttttctcttttggagcctcctccttgctcctctgtcccttctctctttccttatcatcctcgctcctcattcctgcgtctgcttcctccccagcaaaagcgtgatcttgctgggtcggcacagcctgtttcatcctgaagacacaggccaggtatttcaggtcagccacagcttcccacacccgctctacgatatgagcctcctgaagaatcgattcctcaggccaggtgatgactccagccacgacctcatgctgctccgcctgtcagagcctgccgagctcacggatgctgtgaaggtcatggacctgcccacccaggagccagcactggggaccacctgctacgcctcaggctggggcagcattgaaccagaggagtgtacgcctgggccagatggtgcagccgggagcccagatgcctgggtctgagggaggaggggacaggactcctaggtctgagggaggagggccaaggaaccaggtggggtccagcccacaacagtgtttttgcctggcccgtagtcttgaccccaaagaaacttcagtgtgtggacctccatgttatttccaatgacgtgtgtgcgcaagttcaccctcagaaggtgaccaagttcatgctgtgtgctggacgctggacagggggcaaaagcacctgctcggtgagtcatccctactcccaagatcttgaggggaaaggtgagtggggaccttaattctgggctggggtctagaagccaacaaggcgtctgcctcccctgctccccagctgtagccatgccacctccccgtgtctcatctcattccctccttccctcttctttgactccctcaaggcaataggttattcttacagcacaactcatctgttcctgcgttcagcacacggttactaggcacctgctatgcacccagcactgccctagagcctgggacatagcagtgaacagacagagagcagcccctcccttctgtagcccccaagccagtgaggggcacaggcaggaacagggaccacaacacagaaaagctggagggtgtcaggaggtgatcaggctctcggggagggagaaggggtggggagtgtgactgggaggagacatcctgcagaaggcgggagtgagcaaacacctgccgcaggggaggggagggccctgcggcacctgggggagcagagggaacagcatctggccaggcctgggaggaggggcctagagggcgtcaggagcagagaggaggttgcctggctggagtgaaggatcggggcagggtgcgagagggaagaaaggacccctcctgcagggcctcacctgggccacaggaggacactgcttttcctctgaggagtcaggaactgtggatggtgctggacagaagcaggacagggcctggctcaggtgtccagaggctgccgctggcctccctatgggatcagactgcagggagggagggcagcagggatgtggagggagtgatgatggggctgacctgggggtggctccaggcattgtccccacctgggcccttacccagcctccctcacaggctcctggccctcagtctctcccctccactccattctccacctacccacagtgggtcattctgatcaccgaactgaccatgccagccctgccgatggtcctccatggctccctagtgccctggagaggaggtgtctagtcagagagtagtcctggaaggtggcctctgtgaggagccacggggacagcatcctgcagatggtcctggcccttgtcccaccgacctgtctacaaggactgtcctcgtggaccctcccctctgcacaggagctggaccctgaagtcccttccccaccggccaggactggagcccctacccctctgttggaatccctgcccaccttcttctggaagtcggctctggagacatttctctcttcttccaaagctgggaactgctatctgttatctgcctgtccaggtctgaaagataggattgcccaggcagaaactgggactgacctatctcactctctccctgcttttacccttagggtgattctgggggcccacttgtctgtaatggtgtgcttcaaggtatcacgtcatggggcagtgaaccatgtgccctgcccgaaaggccttccctgtacaccaaggtggtgcattaccggaagtggatcaaggacaccatcgtggccaacccctgagcacccctatcaaccccctattgtagtaaacttggaaccttggaaatgaccaggccaagactcaagcctccccagttctactgacctttgtccttaggtgtgaggtccagggttgctaggaaaagaaatcagcagacacaggtgtagaccagagtgtttcttaaatggtgtaattttgtcctctctgtgtcctggggaatactggccatgcctggagacatatcactcaatttctctgaggacacagataggatggggtgtctgtgttatttgtggggtacagagatgaaagaggggtgggatccacactgagagagtggagagtgacatgtgctggacactgtccatgaagcactgagcagaagctggaggcacaacgcaccagacactcacagcaaggatggagctgaaaacataacccactctgtcctggaggcactgggaagcctagagaaggctgtgagccaaggagggagggtcttcctttggcatgggatggggatgaagtaaggagagggactggaccccctggaagctgattcactatggggggaggtgtattgaagtcctccagacaaccctcagatttgatgatttcctagtagaactcacagaaataaagagctgttatactgtggtttattctggtttgttacattgacaggagacacactgaaatcagcaaaggaaacaggcatctaagtggggatgtgaagaaaacagggaaaatctttcagttgttttctcccagtggggtgttgtggacagcacttaaatcacacagaagtgatgtgtgaccttgtgtatgaagtatttccaactaaggaagctcacctgagccttagtgtccagagtttttattgggggtctgtaggataggcatggagtactggaatagctgaccttaacttctcagacctgaggttcccaagagttcaagcagatacagcatggcctagagcctcagatgtacaaaaacaggcattcatcatgaatcgcactgttagcatgaatcatctggcacggcccaaggccccaggtataccaaggcacttgggccgaatgttccaagggattaaatgtcatctcccaggagttattcaagggtgagccctgtacttggaacgttcaggctttgagcagtgcagggctgctgagtcaaccttttactgtacaggggggtgagggaaagggagaagatgaggaaaccgcctagggatctggttctgtcttgtggccaagtggaccatggggctatcccaagaaggaggaattcagaaataggggaaggttgaggaaggacactgaactcaaaggggatacagtgattggtttatttgtcttctcttcacaacattggtgctggaggaattcccaccctgaggttatgaagatgtctgaacacccaacacatagcactggagatatgagctcgacaagagtttctcagccacagagattcacagcctagggcaggaggacactgtacaccaggcagaatgacatgggaattgcgctcacgattggcttgaagaagcaaggactgtgggaggtgggctttgtagtaacaagagggcagggtgaactctgattcccatgggggaatgtgatggtcctgttacaaatttttcaagctggcagggaataaaacccattacggtgaggacctgtggagggcggctgccccaactgataaaggaaatagccaggtgggggcctttcccattgtaggggggacatatctggcaatagaagcctttgagaccctttagggtacaagtactgaggcagcaaataaaatgaaatcttatttttcaactttatactgcatgggtgtgaagatatatttgtttctgtacagggggtgagggaaaggaggggaggaggaaagttcctggaggtctggtttggtcttgtgatccagggggtcttggaactatttaaattaaattaaattaaaacaagcgactgttttaaattaaattaaattaaattaaattaaattaaattaaattttactttattttatcttaagttctgggctacatgtgcaggacgtgcagctttgttacataggtaaacatgtgccatggtggtttgctgtacctatcaacccatcacctaggtattaagcccagcatgcattagctgtttttcctgacgctctccctctccctgactcccacaacaggccccagtgtgtgttgttcccctccctgtgtccatgtgttctcattgttcagctcccacttataagtgagaacatgtggtgtttggttttctgtttctgtgttagtttgctgaggataatggcttccacctccatccatgttcctgcaaaggacgtgatcttattcttttttatggttgcatagaaattgtttttacaaatccaattgatattgtatttaattacaagttaatctaattagcatactagaagagattacagaagatattaggtacattgaatgagaaaatatataaaataggacgaaggtgaaatattaggtaggaaaagtataatagttgaaagaagtaaaaaaaaatatgcatgagtagcagaatgtaaaagaggtgaagaacgtaatagtgactttttagaccagattgaaggacagagacagaaaaattttaaggaattgctaaaccatgtgagtgttagaagtacagtcaataacattaaagcctcaggaggagaaaagaataggaaaggaggaaatatgtgaataaatagtagagacatgtttgatggattttaaaatatttgaaagacctcacatcaaaggattcataccgtgccattgaagaggaagatggaaaagccaagaagccagatgaaagttagaaatattattggcaaagcttaaatgttaaaagtcctagagagaaaggatggcagaaatattggcgggaaagaatgcagaacctagaatataaattcatcccaacagtttggtagtgtgcagctgtagccttttctagataatacactattgtcatacatcgcttaagcgagtgtaaaatggtctcctcactttatttatttatatatttatttagttttgagatggagcctcgctctgtctcctaggctggagtgcaatagtgcgataccactcactgcaacctctgcctcctctgttcaagtgattttcttacctcagcctcccgagtagctgggattacaggtgcgtgccaccacacccggctaatttttgtattttttgtagagacggggttttgccatgttggccaggctggtcttgaactcctgacatcaggtgatccacctgccttggcctcctaaagtgctgggattacaggcatgagccaccgtgcccaatcactttatttattttttatttttatttttaaatttcagcttctatttgaaatacagggggcacatatataggattgttacatgggtatattgaactcaggtagtgatcatactacccaacaggtaggttttcaacccactccccctcttttcctccccattctagtagtgtgcagtgtctattgttctcatgtttatgtctatgtgtgctccaggtttagctcccacctgtaagtgagaacgtgtggtatttgattttctgtccctgtgttaattcacttaggattatggcttccagctccattcatattgctgtaaaggatatgattcatttttcatggccatgcagtattccatattgcgtatagatcacattttctttcttttttttttttgagacggagtcttgctttgctgcctaggctggagtgcagtagcacgatctcggctcactgcaagcttcacctccggggttcacgtcattcttctgtctcagcttcccaagtagctgggactacaggcgcccgccaccacgtccggctaatttttttgtgtgtttttagtagagatgggggtttcactgtgttagccaggatggtcttgatctcctgaccttgtggtccacctgcctcggtctcccaaagtgctgggattacaggggtgagccactgcgcccggcccatatataccacattttctttaaccaatccaccattgatgggcaactaggtagattccatggattccacagttttgctattgtgtgcagtgtggcagtagacatatgaatgaatgtgtctttttggtataatgatttgcattcctttgggtatacagtcattaataggagtgctgggttgaacggtggctctgtttaaaattctttgagaattttccaaactgtttgccatagagaacaaactaatttacatttccacgaacagtatataagcattcccttttctccacagctttgtcatcatggtttttttttctttattttaaaaaagaatatgttgttgttttcccagggtacatgtgcaggatgtgcaggtttgttacataggtagtaaacgtgagccatggtggtttgctgcacctgtcaacccattacctgggtatgaagccctgcctgcattagctcttttccctaatgctctcactactgccccaccctcaccctgacagggcaaacagacaacctacagaatgggaggaaatttttgcaatctattcatctgacaaaggtcaagaatatccagaatctacaaggaacttaagcaaatttttactttttaataatagccactctgactggcgtgaaatggtatctcattgtggttttcatttgaatttctctgatgatcagtgacaatgagcattttttcatatttgttggctgcttgtacgtcttttgagaagtgtctcttcatgccttttggccactttaatgggattattttttgctttttagtttaagttccttatagattctggatattagacttcttattggatgcatagtttgtgaatactctcttccattctgtaggttgtctgtttactctattgatggcttcttttgctgtgccgaagcatcttagtttaattagaaaccacctgccaatttttgtttttgttgcaattgcttttggggacttagtcataaactctttgccaaggtctgggtcaagaagagtatttcctaggttttcttctagaattttgaaagtctgaatgtaaacatttgcatttttaatgcatcttgagttagcttttgtatatgtgaaaggtctactctcattttctttccctctttctttctttcttttctttccctctttctttctttcttttctttctttctttctttctttctttctttctttctttctttctttttgtccttctttctttctttctctttctttctctctttctttttttttttttttgatggagtattgctctgttgcccaggctgcagtgcagtggcacgatcttggctcactgcaacctctgcctcctgggttcaactgattctcctgcatcagccttccaagtagctgggattataggcgcccgccaccacgcccgactaatttttgtatttttagtagagacggggttgtgccatgttggccaggctggtttgaaactcctgacctcaaacgatctgcctgccttggcctcccaaagtgctgggattacaggtgtgagccactgtgcccagccaagaatgtcattttctaagaggtccaagaacctcaagatattttgggaccttgagaagagaggaattcatacaggtattacaagcacagcctaatggcaaatctttggcgtggcttggcttcaagactttaggctcttaaaagtcgaatccaaaattttttataaaagctccagctaagctaccttaaaaggggcctgtatggctgatcactcttcttgctatactttacacaaataaacaggccaaatataatgaggccaaaatttattttgcaaataaattggtcctgctatgatttactcttggtaagaacagggaaaatagagaaaaatttagattgcatctgacctttttttctgaatttttatatgtgcctacaatttgagctaaatcctgaattattttctggttgcaaaaactctctaaagaagaacttggttttcattgtcttcgtgacacatttatctggctctttactagaacagttttcttgtttttggtgttctagcttgtgtgccttacagttctactcttcaaattattgttatgtgtatctcatagttttccttcttttgagaaaactgaagccatggtattctgaggactagagatgactcaacacagctggtgaatctcctcatatgcaatccactgggcttgatctgcttcagattgctgatgcactgctgctaaagctatacatttaaaaccctcactaaaggatcagggaccatcatggaagaggaggaaacatgaaattgtaagagccagattcggggggtagagtgtggaggtcagagcaactccaccttgaataagaaggtaaagcaacctatcctgaaagctaacctgccatggtggcttctgattaacccctgttctgggaagactgacagtttgggtctgtgtcattgcccaaatctcatgttaaattgtaatccccagtgttcggaggtgggacttggtggtaggtgattcggtcatgggagtagattttcttctttgtggtgttacagtgatagtgagtgagttctcgtgagatctggtcatttaaaagtgtgtggcccctcccctccctctcttggtcctcctactgccatgtaagatacctgctcctgctttgccttctaccataagtaaaagccccctgaggcctccccagaagcagatgccaccatgcttcctgtacagcctgcagaaccatcagccaattaaacctcttttctgtataaattaccagtcttgagtatttctttacagcagtgtgagaacggactaatacaaggatctccaaaattccaagtttatgtattctttcttgccaaatagcaggtatttaccataaatcctgtccttaggtcaaacaaccttgatggcatcgtacttcaattgtcttacacattccttctgaatgactcctcccctatggcatataagccctgggtcttgggggataatggcagaggggtccaccatcttgtctggctgccacctgagacacagacatggcttctgttggtaagtctctattaaatgtttctttctaagaaactggatttgtcagcttgtttctttggactctcagcttcctcagactttggggtaggttgcacaaccctgcccaccatgaaacaaatgtttaatatgataaatatggatagatataatccacataaataaaagctcttggagggccctcaataattgttaagagtgtaaatgtgtccaaagatggaaaatgtttgagaactactgtcccagagattttcctgagttctagagtgtgggaatatagaacctggagcttggcttcttcagcctagaatcaggagtatggggctgaagtctgaagcttggcttcagcagtttggggttggcttccggagcacatatttgacatgttgcgactgtggtttggggtttggtatttgctctgaatcctaatgtctgtccttgaggcatctagaatctgaaatctgtggtcagaattctattatcttgagtaggacatctccagtcctggttctgccttctagggctggagtctgtagtcagtgacccggtctggcatttcaacttcatatacagtgggctatcttttggtccatgtttcaaccaaacaaccgaataaaccattagaacctttccccacttccctagctgcaatgttaaacctaggatttctgtttaataggttcatatgaataatttcagcctgatccaactttacattccttctaccgttattctacacccaccttaaaaatgcattcccaatatattccctggattctacctatatatggtaatcctggctttgccagtttctagtgcattaacatacctgatttacattcttttactttaaagtggaaataagagtccctctgcagagttcaggagttctcaagatggcccttacttctgacatcaattgagatttcaagggagtcaccaagatcatcctcaggttcagtgattgctggtagccctcatataactcaatgaaagctgttatgctcatggctatggtttattacagcaaaagaatagagatgaaaatctagcaagggaagagttgcatggggcaaagacaaggagagctccaagtgcagagattcctgttgttttctcccagtggtgtcatggaaagcagtatcttctccatacaatgatgtgtgataatattcagtgtattgccaatcagggaactcaactgagccttgattatattggagcttggttgcacagacatgtcgaccaccttcatggctgaactttagtacttagcccctccagacgtctacagctgataggctgtaacccaacattgtcaccataaatcacattgttagactatccagtgtggcccaagctcccgtgtaaacacaggcactctaaacaggcaggatatttcaaaagcttagagatgacctctcaggagctgaatgcaaagacctggcctctttgggcaaggagaatcctttactgcacactctccttcacagggttattgtgaggatcaaatgtggtcatgtgtgtgagacaccagcacatgtctggctgtggagagtgacttctatgtgtgctaacattgctgagtgctaagaaagtattaggcatggctttcagcactcacagatgctcatctaatcctcacaacatggctacagggtgggcactactagcctcatttgacagaggaaaggactgtggataagaagggggtgaccaataggtcagagtcattctggatgcaaggggctccagaggaccatgattagacattgtctgcagagaaattatggctggatgtctctgccccggaaagggggatgcactttccttgaccccctatctcagatcttgactttgaggttatctcagacttcctctatgataccaggagcccatcataatctctctgtgccctctccccttcctcagtcttactgcccactcttcccagctccatctccagctggccaggtgtagccacagtacctaactctttgcagagaactataaatgtgtatcctacaggggagaaaaaaaaaagaactctgaaagagctgacattttaccgacttgcaaacacataagctaacctgccagttttgtgctggtagaactcatgagactcctgggtcagaggcaaaagattttattacccacagctaaggaggcagcatgaactttgtgttcacatttgttcactttgccccccaattcatatgggatgatcagagcagttcaggtggatggacacaggggtttgtggcaaaggtgagcaacctaggcttagaaatcctcaatcttataagaaggtaccagcaaacttgtccagtctttgtatctgacggagatattatctttataattgggttgaaagcagacctactctggaggaacatattgtatttattgtcctgaacagtaaacaaatctgctgtaaaatagacgttaactttattatctaaggcagtaagcaaacctagatctgaaggcgataccatcttgcaaggctatctgctgtacaaatatgcttgaaaagatggtccagaaaagaaaacggtattattgcctttgctcagaagacacacagaaacataagagaaccatggaaaattgtctcccaacactgttcacccagagccttccactcttgtctgcaggacagtcttaacatcccatcattagtgtgtctaccacatctggcttcactgtgcctaaccaagatttctaggtccagttccccaccatgtttggcagtgccccactgccaaccccagaataagggagtgctcagaatttcgaggggacatgggtggggatcagaacttctgggcttgagtgcagagggggcccatactccttggttccgaaggaggaagaggctggaggtgaatgtccttggagaggaggaatgtgggttctgaactcttaaatccccaagggaggagactggtaaggtcccagcttccgaggtactgacgtgggaatggcctgagaggtctaagaatcccgtatcctcgggaagaaggggctgaaattgtgaggggttgagttgcaggggtttgttagcttgagactccttggtgggtccctgggaagcaaggactggaaccattggctccagggtttggtgtgaaggtaatggaatctcctgattctcaaagggtcagaggactgagagttgcccatgctttgatctttccatctactccttactccacttgagggtaatcacctactcttctagttccacaagagtgcgcctgcgcgagtataatctgcacatgtgccatgtcccgaggcctggggcatcatccactcatcattcagcatctgcactatgcgggcgaggccggcgccatgacgtcatgtagctgcgactatccctgcagcgcgcctctcccgtcacgtcccaaccatggagctgtggacgtgcgtcccctggtggatgtggcctgcgtggtgccaggccggggcctggtgtccgataaagatcctagaaccacaggaaaccaggactgaaaggtgctagagaatggccatatgtcgctgtccatgaaatctcaaggacttctgggtggagggcacaggagcctgaacttacgggtttgccccactccactgtcctcccaagtgagtctcccagatacgaggcactgtgccagcatcagcttcatctgtaccacatcttgtaacagggactacccagggccctgatgaacaccatggtgtgtgcaggaagagcgggtgaaggcacggactcctgtgtggtcagagcccagagggggccatgacgggtggggaggaggctgtggactggctcgagaagtgggatgtggttgtgtttgatctcctttggccagataaagtgctggatatagcattgaaaacggagtatgaagaccagttagaatggagggtcaggttggagttgagttacagatggggtaaaattctgcttcggatgagtttggggattggcaatttaaaggtggtttgggatggcatggctttgggatggaaataggtttgtttttatgttggctgggaagggtgtggggattgaattggggatgaagtaggtttagttttggagatagaatacatggagctggctattgcatgcgaggatgtgcattagtttggtttgatctttaaatgaaggaggctattagggttgtcttgaattagattaagttgtgttgggttgatgggttgggcttgtgggtgatgtggttggattgggctgtgttaaattggtttgggtcaggttttggttgaggttatcatggggatgaggatatgcttgggacactggattcaggtggttctcattcaagctgaggcaaatttcctttcagacggtcattccagggaacgagtggttgtgtgggggaaatcaggccactggctgtgaatatccctctatcctggtcttgaattgtgattatctatgtccacttctgtctccttcactgtacttggaattgatctggtcattcagctggaaatgggggaagattttgtcaaattcttgagacacagctgggtctggatcagcgtaagctgctctggttttattgaacagatgaaatcacattttttttttcaaaatcaaagaaatcttatagagttaacagtggactcttataataagagttaacaccaggactcttattcttgattcttttctgagacaccaaaatgagatttctcaatgccaccctaattctttttttttttttttttttttttgagacacagtctgggtcttttgctctgtcactcaggctggagcgcagtggtgtgatcatagctcactgaacccttgacctcctggacttaagggatcctcctgcttcagcctcctgagtagatggggctacaggtgcttgccaccacacctggctaattaaattttttttttttttttgtagagaaagggtctcactttgttgccctggctgatcttgaacttctgacttcaagtgattcttcagccttggactcccaaagcactgggattgctggcatgagccactcaccgtgcctggcttgcagcttaatcttggagtgtataaacctggctcctgatagctagacatttcagtgagaaggaggcattggattttgcatgaggacaattctgacctaggagggcaggtcaacaggaatccccgctgtacctgtacgttgtacaggcatggagaatgaggagtgaggagccaccggaaccccatattgtttagtggacattggattttgaaataatagggaacttggtctgggagagtcatatttctggattggacaatatgtggtatcacaaggttttatgatgagggagaaatgtatgtggggaaccattttctgagtgtggaagtgcaagaatcagagagtactgaatgccaacgcttctatttcaggaacatggtaagttggaggtccagcttctgggctcagacgggtatagggaccaggaagtctcacaatccgatcattctgatatttcagggcatattaggtttggggtgcaaaggaagtacttgggacttaggcacatgagactttgtattgaaaatcaatgattggggctggccgtggtggctcacgcctgtaatctcatcactttgggagaccgaagtgggaggatggcttgagcccaggagttggagaccagcctaggcaacatagccagaccctctctctacaaaaaaattaaaaattagctggatgtggtggtgcatgcttgtggtctcagctatcctggaggctgagacaggagaatcggttgagtctgggagttcaaggctacagggagctgcgatcacgccgctgcactccagcctgggaaacagagtgagactgtctcagaatttttttaaaaaagaatcagtgatcatcccaacccctgttgctgttcatcctgagcctgccttctctggctttgttccctagatcacatctccatgatccataggccctgcccaatctgacctcacaccgtgggaatgcctccagactgatctagtatgtgtggaacagcaagtgctggctctccctccccttccacagctctgggtgtgggagggggttgtccagcctccagcagcatggggagggccttggtcagcatctaggtgccaacagggcaagggcggggtcctggagaatgaaggctttatagggctcctcagggaggccccccagccccaaactcaccacctggccgtggacacctgtgtcagcatgtgggacctggttctctccatcgccttgtctgtggggtgcactggtgagattggggggataaaggaaggggggcgggttctgactcttatgctgaagcccttttcctcccacccagtgccccagcctcgtcccttcagcccacagttcagcccagacaatgtgcccctgactcttccacattgcaatagtcctcatgcccacactaggtccccgctccctcccacttacctcagacctttctctccattgcccagccaaatccctgctcccagctgctttactaaagagcaagttcctgggcatctctgtgtttctctttatggggttcaaaacctttcaaggacctctctccatgccactggttccttggaccctatcactgggctgcctcctgagcccctcagtcctaccacagtctactgacttttcctattcagctgtgagcattcaaccctgtcccctggaccttgacacctggctccccaaccctgtcccaggaaacccagattccaccagacacttccttcttccccccgaggctatctggcctgagacaacaaatgctgcctcccaccctgagtctggcactgggactttcagaactcctccttccctgactctttgccccagacccgtcattcaatggctagctttttccatgggaaaaacacgagcacccccaaccacaacggccagttctctgattccctaaatccgcacccttttcaaaacctcaaaaacaaaacaaaacaaaacaaagcaagaaacaactcaggcagaactgtttgcttaaccttggacatggtaaaccatccaaaaccttcctctcccagcaactaaacctctccactgggcacttatccttggtttctggaacctcttattctcttagaacccacagctgccaccacagtgtcccttctcccagtgtaagaccccaaatcactccaaatgacccaacccccaacccgatgcctgcttcagatgtttcccatgtcccctactctgatctctggggtcagctccgttctcagagcatgaagcctcccgacctggtccagccaccaacccgctaacgcagggaatagctacagaattgccagccctcccaggaccccttgcttgtgtcctggactcccagtcctggtcctctgcccccatgtctcttcaaacccacagctcagctccctcccctatccaattcttttgggtctgatccccctgacccagcaccccctccgcaggtgccgtgcccctcatccagtctcggattgtgggaggctgggagtgtgagaagcattcccaaccctggcaggtggctgtgtacagtcatggatgggcacactgtgggggtgtcctggtgcacccccagtgggtgctcacagctgcccattgcctaaagaagtaagtaggaccctgggatctggggagggaatggctgtgtcccacaggaataacagcgggatgcttcccccagggtcacttctcaggtgaggcttcagactaaaggagagagggaaggtcctggcccaggtcgcacccggaggcagagctggggctggaccactctccccatggctgcctgggtttctctctgtgtctgatctcgctgtgtctcttggtatctggctctggttgtgtctgtatgactgtgttttggtctctatgtccctctctcttttctgtctccctgtgtctgtgtctcccccgtctctgtctctgggtctctctgtggccatctctgtcaccgtgtgtctcaccctgcatctctttgcctgtctttctctctgggtctctgcctcagcccttcctcatcactactgaacacaccccgtgagggtgggtggggagcacccagaaaaaggaaggactttaagctcaatgtgtgtgcatgtgagggggtgcctgtcattgcacagcactctctgcaggacatccctccaccctggggagacacagggagggctggtttcagctgtagctgggtgcacaattgaggagggaggaaggagaaggggaaacaagaaaggaggggaaggtggccgggcacggtggcccacgcctgtaatcccagcactttgggaggccgaggtgggtggatcatctgaggtcaggagtttgaaaccagcctggccaacatggcaaaaccccgtctctactaaaaatacaaaaagtagccaggcgtggtgctgcgcgcctgtaatcccaattactagggaggctgaggcaggagaatcgcttgaacccgggagggagaggttgcagtgagccgagatcgtgccactgcactccagcctgggtgacagagcaagactccatctcagaaaaaacaaacaaacaaacaaacaacaaaaaaaatcgaaaggaggggaagggagctggagagagaaagggggacgtggccctgagctgtgggccgggccacccgccactacagagccctcactccagccccagctgcaggtgagccaccctcatgcctctcctcctccccctgctactccacactcctcagatgcccccgtggcctccctcctttttctctcccacactgtatcacccctggcttcctctctgctgtttctccttctctctctgacttcccgcatccttttctcatttgtctatttctcactcccttcctggttctgttctttctcccttcctcttccccatgtctatttcttgctgtctctgtctcttctttgctcatcctaattctcactgttctcccttctgtttttgtcattcctctgccattttatgctctctcttttccacttcgtttctttcagtttctgtctctgcctctcacatgatcacactcctgttttctaactcactgtctgtatttcaccacgactatatctccccgacccctgtgcttttctcactgtttctttttcttccctttggagtctcccttatcctcccctgccccatctacctttccccattttctctctcctcatgcatccacccccttcctccccaggaatagccaggtctggctgggtcggcacaacctgtttgagcctgaagacacaggccagagggtccctgtcagccacagcttcccacacccgctctacaatatgagccttctgaagcatcaaagccttagaccagatgaagactccagccatgacctcatgctgctccgcctgtcagagcctgccaagatcacagatgttgtgaaggtcctgggcctgcccacccaggagccagcactggggaccacctgctacgcctcaggctggggcagcatcgaaccagaggagtgtacgcctgggccagatggtgtagctgggagcccagatgcctgggtctgagggaagtggggccaaagaaccaggtggggtccggccacagcccagtttttctctgacccatagtcttgcgccccaggagtcttcagtgtgtgagcctccatctcctgtccaatgacatgtgtgctagagcttactctgagaaggtgacagagttcatgttgtgtgctgggctctggacaggtggtaaagacacttgtggggtgagtcatccctactcccaacatctggaggggaaaggtgagtgaagaccctaattctgggctgcaatctgaaagctaaccagacatctgcctcccctgctccccagctatagccacgccccctccccatgcctcatctgccgccctccttcccccttccctgactccctcaacacaagaggtgattctcacagcataattcacccattcctgtgttgagcacatgcttactgggcacctgctacgtgaccagcattgccgtagaccctgggaagcagcagtgaacaggtagagagcagcctctccctcctgcagcccccatgctggtgaggggcactggcaggaacagtggacccaacatggaaatgctggagggtgtcaggaagtgatcgggctctggggcagggaggaggggtggggagtgtcactgggaggggacatcctgcagaaggtaggagtgagcaaacacccgctgcaggggaggggagagccctgcggcacctgggggagcagagggagcagcacctgcccaggcctgggaggaggggccgggagggcgtgaggaggagcgagggggctgcatggctggagtgagggatcaggggcagggcgcgagatggcctcacacagggaagagagggcccctcctgcagggcctcacctgggccacaggaggacactgcttttcctctgaggagtcaggagctgtggatggtgctggacagaagaaggacagggcctggctcaggtgtccagaggctgtcgctggcttccctttgggatcagactgcagggagggagggcggcagggttgtggggggagtgacgatgaggatgacctgggggtggctccaggccttgcccctgcctgggccctcacccagcctccctcacagtctcctggccctcagtctctcccctccactccatcctccatctggcctcagtgggtcattctgatcactgaactgaccatacccagccctgcccacggccctccatggctccccaatgccctggagaggggacatctagtcagagagtagtcctgaagaggtggcctctgcgatgtgcctgtgggggcagcatcctgcagatggtcccggccctcatcctgctgacctgtctgcagggactgtcctcctggaccttgccccttgtgcaggagctggaccctgaagtcccctccccataggccaagactggagccttgttccctctgttggactccctgcccatattcttgtgggagtgggttctggagacatttctgtctgttcctgagagctgggaattgctctcagtcatctgcctgcgcggttctgagagatggagttgcctaggcagttattggggccaatctttctcactgtgtctctcctcctttacccttagggtgattctgggggtccacttgtctgtaatggtgtgcttcaaggtatcacatcatggggccctgagccatgtgccctgcctgaaaagcctgctgtgtacaccaaggtggtgcattaccggaagtggatcaaggacaccatcgcagccaacccctgagtgcccctgtcccacccctacctctagtaaatttaagtccacctcacgttctggcatcacttggcctttctggatgctggacacctgaagcttggaactcacctggccgaagctcgagcctcctgagtcctactgacctgtgctttctggtgtggagtccagggctgctaggaaaaggaatgggcagacacaggtgtatgccaatgtttctgaaatgggtataatttcgtcctctccttcggaacactggctgtctctgaagacttctcgctcagtttcagtgaggacacacacaaagacgtgggtgaccatgttgtttgtggggtgcagagatgggaggggtggggcccaccctggaagagtggacagtgacacaaggtggacactctctacagatcactgaggataagctggagccacaatgcatgaggcacacacacagcaaggatgacgctgtaaacatagcccacgctgtcctgggggcactgggaagcctagataaggccgtgagcagaaagaaggggaggatcctcctatgttgttgaaggagggactagggggagaaactgaaagctgattaattacaggaggtttgttcaggtcccccaaaccaccgtcagatttgatgatttcctagcaggacttacagaaataaagagctatcatgctgtggtttattatggtttgttacattgataggatacatactgaaatcagcaaacaaaacagatgtatagattagagtgtggagaaaacagaggaaaacttgcagttacgaagactggcaacttggctttactaagttttcagactggcaggaagtcaaacctattaggctgaggaccttgtggagtgtagctgatccagctgatagaggaactagccaggtgggggcctttccctttggatggggggcatatctgacagttattctctccaagtggagacttacggacagcatataattctccctgcaaggatgtatgataatatgtacaaagtaattccaactgaggaagctcacctgatccttagtgtccagggtttttactgggggtctgtaggacgagtatggagtacttgaataattgacctgaagtcctcagacctgaggttccctagagttcaaacagatacagcatggtccagagtcccagatgtacaaaaacagggattcatcacaaatcccatctttagcatgaagggtctggcatggcccaaggccccaagtatatcaaggcacttgggcagaacatgccaaggaatcaaatgtcatctcccaggagttattcaagggtgagccctttacttgggatgtacaggctttgagcagtgcagggctgctgagtcaaccttttattgtacaggggatgagggaaagggagaggatgaggaagcccccctggggatttggtttggtcttgtgatcaggtggtctatggggctatccctacaaagaagaatccagaaataggggcacattgaggaatgatactgagcccaaagagcattcaatcattgttttatttgccttcttttcacaccattggtgagggagggattaccaccctggggttatgaagatggttgaacaccccacacatagcaccggagatatgagatcaacagtttcttagccatagagattcacagcccagagcaggaggacgctgcacaccatgcaggatgacatgggggatgcgctcgggattggtgtgaagaagcaaggactgttagaggcaggctttatagtaacaagacggtggggcaaactctgatttccgtgggggaatgtcatggtcttgctttactaagttttgagactggcaggtagtgaaactcattaggctgagaaccttgtggaatgcagctgacccagctgatagaggaagtagccaggtgggagcctttcccagtgggtgtgggacatatctggcaagattttgtggcactcctggttacagatactggggcagcaaataaaactgaatcttgttttcagaccttatactgtgtaattgtaagtggacatttagtaatgtacagggggtcagggaaagacgggggatagtgaatgcacctgtgggactggtttggttttgtgattgagtaacccatggagttatctctgcaatgatgaattgtttgaaagaaacctgattgattttatactgaattagaagttaataagcatgctgaaaaataagagaacatattaggaatattgagcaagactaacatacataaaatatgagaaaaaggtaggaaatattaggtgggaaaaatatgataattggaaaaagtaaaaaaaatggattaatagaattgagtagaggtgaagaacgcaatagtgacattttagactagattgaagaaaaatgtcaaagaaatactgaatgatgtgagtgctggcagtgcagatactgaacactaaagactcaggaagagagaaaaataggaaaggaggaaacacatgactaaacactgaaggcaggttttttttttttttttttttttcgcagagtttcactcttatcgcccaggctggagtgcaatggctcagtctcggctcactgcaacccctgcctcccagttcaagtgattctcctgcttcagcctccccagtagctgggattacaggtgcacaccaccacacctggctaattttgcatttttaatagagacggggcttctccatgttggtcaggctggtcacgagctcctgacctcaggtgatccgcctgccttggcctcccaaagtgctgggattgattacaggcgtgagccaccgcacccagcctgaaggtaagttttatagaatttaaaatatctgaacgacctcagatcaatagaatccatagagtgtgattgagtagaaagaaggaaaggctatgaaacaaaaaagaaaactagtattgtcattgacaaaaaatgtcattgacaaagccctggagagaaaggatggcggaaatattgaaggaaaagaatgtagaactagaatataaattcattccaacagtttggcagtgtgtatcaatagccttttttagacaatgcaacattctcatacattgcttaagggagtataaattggtatactcattttagaaaatgatttagaagtatatgttgcagctgaacatatgcatgacctatcagtatcaatcttagaaatataccccctagaaaccctagaaatacttcatattttcataaaaatcctcgtaccagaaagttcatagcatcctcaaaccagaaactgcccaaaatgtttatctataggagaatggagaaataaatggcatattcataccaatgaatagtgtgtgtaatgaacaaggattatgtttcatccaagacagagatggggctttaaagagactgccacaggaacacaaagagaaaaccagagacggagagacagcaggggaaacagaatctgagatagacaatgacaaaatgggaagagaaaaaacaaggtagctggagacacacagagagacacagacaaacaggaagacagtatcccctcgtggttaacatcacagcttctgtttattaagcacctaatgtgttacaactgcacagatcccattgaaccatgggccctctccctcacctccccaaggaggcagcatgcaggagctcaactaggcagagaatccaggagtcctgaggtggttgcatgaatggacagcatacactaaatgaagaaatgctagacctgccctggtgtactgagcatgagggatttaaaggctttgggtaatgggaacacgatcatacattcatcattgtgacctgcacacccaccctgggaggctccagagggcgcacctttcactacaacaggagaaatgaatttgtgaggggagtaccagcatccttgaagagctatatgatccctcacctctgtaggtcagaaattatgtgggaatggctgacactgaagcaggaaatctcaattcagtgaggataactggataccaagatggttgaggccaagtgacgctaatttcacctaaacatcggcatggttagtacaatagacagcacagtcaacacagtaatcatgatagtctgacttcggagaactatggtgctggctagttgatcacagtgttcctggaagagaaatagattggaaaagactaaattatttctatgtaatcagaagacttcttgggtccagtgaacagaagtataatttgaatcataaaagcaaagaatcctggcccatcgttcaattcataaacttgagtcagttaccagatgttttggagattattggacactgattcttaactgacactaattacaagagacccaaaacaccactgtagtccaacaatcagtgtggcgcctggtggaggtcaggagttgtggccaaggcccatctcacaatgggtcccgtgggtctctgaacctacccttccggtatttcaccaattacagaataatgcataactgggacaggcatgctgagaaagtgacagaatttccacatgggcttccagacctgtggatgagggatgttacaccagacaagtccaggtggaagtcgctaggacttagccccatctaggctagccccacctagccccatctaggagggatcaggggttacaccaagctccggtccttcctttatcatgtggctgcacccagctgaatcccgtcgtatctccacacctagggaaatcataaaccaaaagcaagtctgcgttcctgcagggattacagaggttggtgacactgtcaatgattgaaggacgcaggagtggtggttcccactacatccacatccagttcacctatttggcccatgctgaaaacagacagatcttcggggatgatagtgagttatcctaagtataaccaggcagtgaatttcattacagctcttcatgtggcttcattgtttgagcaaataacacatctcctggtacctcatatgcagctattgacctggttaatgttttgtttcacctcaatatcttaataaaggcaaccagcagcagttcgttctctactgacaaggctttattatccatgaatatcctcttggtgtctcagtgatgatgcatccactgtcatttctgatcttactaacatgtatcttctgtttttttttttgtctttgttatcctggctacagaattatcaattttattgatcttttaaaagaaacagttgttttagttgattttctctataggttgtttttaatttcgccaatttctgccataatttttattatttattttcttaggtttgcattaggcttaaattgctctctgagtccatgggaggttggactggaagctgggattcagagtgggagtctgggagtgggtccagatagagggtgtggctggaggtgagttctttgggactggagaagatctaggggctaggtgggatgtggctagcgtctgatgggctgtggggcacccaggggtctgacctggtgtctgagggaacaatagatcatcggagatgtgagatatgaaaacgaagaggaagaacatgttgggcaggagaaaacacaagggtggtaaaaggaagtttttttacatagctgttgggatgaatttgtatctggagagattcaggtggggccaggaaggttcagctttgtcctggtttacactccccacaaaggagggatcaggggttacaccaagccccggtccttcctttatcatgtggctgcacccagctgaatcccgtcctatctccatctccagttgtgcaggtgcaacctcagtgcccacgtgtttgtcaagaactctgaggggctgacattttaccaacttagagacaaaaaagttggcctgccacaccttcacgggtattggcagaacacaccagaacctggccagagacaaaggacttgattacttgacacagcaggcagcgtgaggttcatgttcatatgggttcatcttgcccgagtcctatagggtgaccagagcagtccaggtggattttgcactcaaagtggtttatgccactgcagagggtcctgagtttcagaatcctcagtcttataagtgggcactagcaaacctgcccagcatttgccttttgctttttaaagagacaatgtctcactctctcccaggttggaagggagtggtgggatcatagtccactgcagcctcaaactcctagactcaagcagttctcccacctcagccttatgagtagctgggactacaggcttgcaccaccacacctggctaatgtatgtaggtatgtatatacttattttgtagagagggagtcttgcattgatgcctaggctggtcttgaactcctgacttccaccgatcctcccacctcagccttgaatctttgtctttggtggtgatattatttttattaccctgaaccacaaacagaattgctgcacaggggcatattatatttattgtcctggacagtaaactagtccattctgggaagacattatttttattatcctggacagtcagcaaacctgctctgatggagataccaacttgaaagactgcttgttagccagacatccttgatagatattatcgagtaagataatgttagtacctttgctcaaaatacatatagaaatgtaagagactcgtggaaatttgtcactcactactcagctcctggcctccacccttctctgctggagagccccccctttcttcccttccacctctcactcactgcacgttcctccagttctcccagtgttctgggccctgtttatgcccatggtagatataacaacagtaattcaatcgggatgagcaaaccctgccctactcttcggtgcatatgtgtgtgtgactttgactttgaaggtcctttgactttgaaatgtctctgtttggtatctgtgcatagtgaagctctgtgtgtgcatgtacatgggtggtgggagtgtgaggctctgtctgtccactacctgcccatatgtgtgcatttgtcctcaaatgcaaaacctgatgagtcaccttcaataccaagtatctctgatgtgggcactgatccagacgtagattatttcctttcctggctgcctgtgtctctagctacacctttgaccttgaatggccaaccgtgtgtctgggtactaccctggcatctgctctagtgggtccatatccgaatgcctggcctctgggactgcgcctgcaactttgaatcaccgcacactggcttctgcatgaatcgcagtgttgaccttgactgtcatatccggtcctgtgattatgtctgaattacttcggccatatttgtttctcaaatctgaatatccacagatgctatgtatctcccacccatctaacctttacagcaacctccaatttacagacgaaatggaggcacagtgagatcaaagaattttctcaaagtctcaaagctgatatttttgaatgcaggtggtcagactctggatataaccaccatactcatgtctgtgaatcagtgtctgggactctgagtgcatatccctgtctcttccctttgtaatcttattaaagacccaaccttgtacatccagaccctgtgtgcaagtgtgtacccacgtgaccttgcacacccagagccacactggaggttatgaatttaggtttgagctcttatgtccaaatctgtgtctatgaatgtgtatgtgtgtgcttacacccatgcctgtccatatttatatgcacatgtgatcacttgggctcttattatataagccacacgtacatgcatatgaatttctgcttaaggcacacagtctatatatgtatccaagcctggaaaccatcttgtgcctgtatgtatgtccatgaccttgtgtggtcacatatgtgtccttccctggcatgctgagtttggcttagatctccagattctgaggccaagaatgctaccgtacaaattgaatggacacgtctgtttgaggtctctgacatatgaaagcaaccgtctgtctaaacctgtatccagtgaacctgtctccatctccaatcacagagggaattttgccctctggtccttcatttcccttctgtctgtctctctctggctctcaggaacctatcacatgtaggataggagatgaaaggagaagttctggaaaaacaggctgcagctgtaaaacctaaagagaggagagtgcttcaaaaataacagaggctgggcacagtggctcactcctgtaatcccagcattctgggaggccaaggcaggcggatcacgaggtcaggagatcgagaccatcctggctaacatggtgaaacccggtctgtactaaaaaaacaaaaaacaaaaaacaaaaaacgaaaaacattagctgggcgtggtggcatgcgcctgtactcccagctactcgggaggctgaggcaggagaatcgcttgaacctgggaggcagaggttgtagtgagccgagattgcaccactgcactccagcctgggcaacagagcaagactgtctcaaaaacaaaacaaaacaaaacaaaaaagcaaacaaaactaactcccccaaaaaccaaagacttccggataaattgtgggaaaagcatatgtgaatggttttcacatatgtaggtactgtagggcactgggaagggtggccacataggaagaagtctctgttctcagggatcctctattcctttccgcagaggctcaggatggcaatggggaggtgtggggaggggtgagagagactcgagagagagagagagatgggcagagagatggggactgagatacacaatgacagagatggccgagagagagagatgggcagagagatgggggctgagatacacaatgacagagatggccaagagagatgcagagaaaaacagagacggggagacacagagacaagagacagagaagagagagggagatcaaggccgaaacacagccacacagacacagcagagccatataccaagagacacagagagactagatggacagatatacggtgagagaccaaggcagcccccaggaaggtggtccccaatgcctgttcatgcaacctgaaccagaaccttccctgtctctctccctctgtccccagcctcatctgaggggaaatgcccaactgttattcctgtggggcacagacacccctccccagaccccaggtccccactcaccgggtgatgcagtgagcagtagtgagcacccagtgaggatgcagcaggacgtccttgcactggaagttgccgaaatggtacaaccctgccagggttgggaaagcttctcacactcccagcctcccacagtctgggactggatggcaatcacagcatctgcagagggagtgctgggtcagggagggcaggcttggcaggagggcccagggactgggctaagagagggagctgggctgtgggtttgaagggggcagaggaccagggctggggatccagggacacaggagggcctgagattctggaccattccttggggtttgggttggtggctgttcctggtggggagactttgctctgagagcagggcaaaccccagggattagggtaggagacatgagattgcctggagcaggcattgggttgggagcaaagtatgtggggtgatttggggtcttgtctaggaggctgtggtggggagatgaaggacagagtgcttgtgggtttatgagcttcttgagtctgggatgtcctgctcctatggacaggggacattttcccaagttagcagttttttcagccaaattacctaatatgatgctacacccagatcagggtggcaggagaagagtcaggaatggggacctagggacagacacctgatccagtccccaaggcttctcctcttcctggtcagcactctctgaagacagtgggtctcttctctactggttccatgtctctgccattagctcagattccatcttcttgtccttgtctttccgtctccatctctgtctgtctctttgcatgtgtatatttgtgtgtgtgtatcttattttttttctgtttctctaaaaatcctgtctgagagaaactttactagttgttctagaggaaggaagtcttaaggatgagctttctgaattagttctggcatttctagtgtttggaattggttctgtaatgcgaataaattaaaggcaccacaactctattttcagtaatacaaacagaaataaaagtccgtggtgtaatgtggcaatagagatatgcaaaataacaccactggatattccgaatcaaataaaggagaaatgaccagggtgatcatgtatatgacactttagaatattttttaaagtaacaagcataatgaaattggatgattgcttctagttgtgttggcaaaagtggaaaaagaaaagaatgagcacaggactttaaatttccagatctcagactgaagaaataatctaaagttgctatgtctatgatgttgaaagaaacctttatctcctgtagccacagagctgagatttctgaaaatcaaacctagaatcttattgtgtgagtggctgaattacagtgctaattaaatcctcagcatgcatgctgtctgccattaaagtgaaggcataattgaaagggtagggatcccaaaagttggaatgaagacatgtgggaagactctgattatggtcaggagactggggaaagggtctagttagaggatgtggcctgaggctttaaaaatgaagatccaggggacagatagaatgtggccagtgtctggcaggatgtggggcacttggcatctatcctggtgcctgaggaagcagtgaactctcccaagagggagaacccaagaggaagagcatgttggggaggaggagagacaaatggcgaaaggaaatttattatgccaaaggtgggatgaatttgtatctggaaggatccagctagagccaagaaggttcagcttcagcttggcttacactatccccagaaaagttcaactcagccttgttccctcttctgttattttgctgtgcccagctggggcccctcctaactccaagggccaagaaagttcaacttcagcttggcttacactgccctcaaaaaagttcaacctagccttggtccctcttctgtcatgtggctgtgcccagctggggcccctcctacctcccacccttccatctccagctggacaggtgcagccttagtgcccaactgtttgtcaaaaactctgaaggggctgatattttgccaactggcaaacaaataagttagcctgccacagttttatggatactggcagaacacactggattctggatcaaaggcaaaggactttattactcacagcacagaagacagcatgagctttgtgttcacatcagttcgccttgaccctaagtcccacaggaatgatcagagaagtttaggaggatcctgtgacacgatgctttgacccacagctgagaaacctgagcttaggaatcctgaatcgtatgaagggactattaatatttgtccgagagggagacacattcttcgttatcccgaccacaaacagacctgctctggaggaacatactatatttattgtactgaacactaaacaaatctgctttaagggacacattattacactggtcggtaagcaaagctgttttgttgaaaataccatttgcaagatggcttgctagccaaacatccttgatagtccaaagcaatttttttttcactttgaagccatgtagaaacatgagaggcccatggagaattttctctcagaatcataatttaaattctctaaccttccctgcaaaacaaacttatactttcttccttataccccttgtctgccacatctgttaccctagcctcaccagtgtgccaggcccagttcccaaagatggcaggaaaaatatggggatctgatctggatgtgccctattgttgctgtctgtttatgtgtggatttgactttgaggggacatatccacgtttcccagtgtagaggctcagggtcttctgactgtgaaaagtccttgtttggtacttgtgcgtagtgcagttctgtgtgcgtgtgtgtgtgttgtgtgtgtgtgtatgtgcatgcacatgtgtatgtggtgggtgtgcaaggccctgctgtccactacctgcccacacatgtgagccatgtccccatatgggaaaactgatgagtaaccttcaacaccaagtgtctgacttggggggtgatctagagacagataaatctttcctgtcccagctgcctgtgtctccagaatatgtctttccccataaatgcccaactctgtgtctgggagtagccaggaatctaacctatgaagctgtatttgaatgtctggcccttggggttggtgtctgcaactctgaatcaccactaagtggttttatggatgaatcacagtattagctttgactaactttatctgggtctgcacatatgtctgattttggctatatttgttttcaaaatctgaacgtgcacacgtatgtaccataactaagtcatgtgtccttgattaaaataactgatatttattactatgcattacagttactgtgtgccaggcattatcatgcacacccacacacaggcatacacacaaagacacatttttctatttaagtcttaaggaaacccccatgaacaaatgaggaaatggaaagacattgaggtcaaataattttctcaaagattcagaaataatatgtttgatcccaggtggtcatacttttggatacaaccaccatactatagacccatgtctgtgaattgcttttggaggggctactcaggatatgtcccctcaaagtcaaacccaacactgcatatcagtgtctctctcctgtgtacctttactaaggcccccaccttgtacgttcagaccttgtgtgcaagtgtgtgcaactggaacactgggtatccagacctacagtggagtgtagattttggtccaagcttctatgtccaaagctctgtgtgtgtgtgtgtgtgcgcgtgtgtgcgcgtgtgtatgcacacatacacctatgtcttttttttttgagacagagttttgctcttgttgcccaggctgaagtgcaatggcatgatcttggctcaagtcaacctctgcctccctggttcaagctattctcctgtgtcagcctcccgagtagctgggattacaggcatgtgccaccatgcctggctaattttgtatttttagtagagaaggggtttctccatgttggtcaggctggtcttgaactcccaatctgaggtcatccacccacgttggcctcccaaagtactggcattacaggcgtgagccactgtgcctagccacacccatgtcttaactgtccacacttacatacaaatatcaatgtccatatagtgaccctcgaagctgagatctatttatatgttacgtgaaggtaagctgtaaatgctgtacctaccaatacctaagtttgaaagtctggttgtgcatatatgtaggtccacaatctagtatggccacatctgtgcccttgtatgaccctgagtttggccgagatacccaaactctgggaccaaatttgtgtgtcatacatactgagtgtcacatccatttaatatctgtgacagatgaatgagcctgaatgactggctccaagtgaccacttgtctgaactcactgtatccagtgaccttatcttcatccccaaccacagagaacttcttgccctctggtcttttcccctttctctctcttttgggaacctataacacatgagatgggtggtgggaacaaaaaaggatacagttccagggaaaagaggcaaaagttttttaaagctagagagaaaacagtattttaaaaacatatcagaggctcctggagaaactgaggggaaggcataagtgaagaatatgtaggtagataagggcacagtcagggaataggaggtgagaaggaccctgtcctcatggatcctctactcccatcccagaggcctaggacggtgactaggtcctgggaactgaggagtgtatgctctgctcccaatcttggcaagtgattttctttgaatgtggacattttaactgtggtccttcatgcactgtcccccgctgtgagctctctgaggcccactaccaaacctggtaagaaggcaggggtcagggtcctgaaaaacgtggctgggagtaggaacccatgggttctgtacctggagttggagaaggctgaaagccgggagtccaaggtcttggagaaggaaaatgttgggattctggactcctgtattttaatgggttggggagagagtccttgactcctctgaggacaaaagtactggagcttggggactacagcccaatgggtgtgtgcccacacattggaactcttagctatctgagaggcaggagtaggggccattggtaccagggcctcaggaggtggtaagtggaatttcagattatcacagggcttggggatcccagattgctaacatttgggtctttctgtctactccacactcagcttgtgggtaaccactggcctgctagctccctatagttgctgggccagcaggagcccgacgagcaggaactgcgcaagcgcgctggttctaaacagctgaagggcgtttggcgcatcttctgacatcatcagcactatgaggatcccggcgcaccactatggcgtcacttcggcgcaactagcccaccatcacccgtgcgcctctccagtcacatgtatcacatggcactgcccacgtctgcccccttgtgggtgtgtccaacatggtggctgacttaggctttgtgtccatagggaggagcctaggaccacagggaggcttgggtcacaagatgcttgagaaaagccagatgtgtccagtctatgaaacctgaaatacatggcttttgggaagaggggcagggtcctgaatgtatgggtccttctcaagttcacggtcttccctggtgggtctccttgataattgtattgtgccaacatcagcataatttcagacacatctggtaacatggactacccagggcacctgatggacaccttagtgtgtgcatgtttggagggcggaggcgcaaatgatcctaaaatcttgatcttggttactaatgttgttggctgttcccctaaactgcacatccagggcaaatgttgatttgttgcatcctagaccctgccctcagctacacccctgtctccaccacaatccatcccaacaccatcctcatccctaactttgtcaccatctcctgcccttgagagctgatgaaaaggaacgcccagaaaatggaacttacggccaggcgcggtggctcacgcctgtaattccagaactttgggaggccaaggcgggtggatcacctgaggtcaggagttcaagaccagcctggccaacatagtgaaaccccgtatctactaaaaatacaaaaattagctgggcatggtggtgcgcgcctgtactcccagcttcctggggaggctgaggctggagaatcacttgaacccaggaggcggaggttgcagtgagctgagatcacgtcactgcactccagcctgggcaacagagggagactctgtcaaaaaaaaaaaaaaaaaaaaaaaaaaaaaaaaaaaaaaaggaaagaaaacaggggatgtgtgcagaaaaccaggagatatagagtcaagaagcatcagaaaaaaggtcaaaacaaaaggtcaaaaagggcccccgccaacaacaacaaaaaagaaaatggaagtcacctgccaacattacctagttacccagaggctgagctgggattcacacccagggctgactaggtctttctcctgcatctcctccccttttcttggaacacctacgtctctcaggttatcctttccttccgaagcttccacagttggctcaaacccagggttctgagataacctagtctccctgactccatggaggctctgcttctcattcagacctagcaaaatcatctaaagctcactccaccaatattgagctcctagccagaccttacaccaaggtaagccctggcccatgctcaagccccacccctcctaaagtcttatccctgctcaagccctgcccctagcccaagccctttcctctgtgcaagcttctgaccaaggcgctgccctctgctcaagccccaccccttatcaggctccacccatcccaaagccgtaatcctgctcaaccccacccctgctcaactccacctgtgccccaggccctttgcacaaaaattagctgggcatgatggtgcacacctgtaatcacagctactctggtggctgaggcaggagaatcgcttgaacccaggatgtgaaagttgcagtgaaccgagagcatcatctctgaccaaggctctgccctcttcttaagccccatcatgcataaggccccatccctgctagcctgccacccctggcctgggactctccttcactcaaactctcctccagccagcgcttgcctcttagctggcgctctgccccagacccacccagcactcacttctggaggcagtgtgcagccgacagcacccactgtggatgctctaagatgccccagcgtcttaaagttttccactgacggtgctggctgcctgccagggctgcaagtgcagactgtattcctgttgccaccaatgaggactttgctggcactggagaaagtgcttgggaatggagtctgggatccttcagggggaatcacagctcctggggatggaatcaggacacaaagtggaggggttcagagtcgagggtcagggttaggattaggaaggtgtgggttgtattgaggggtgtgatggttaatatcaagcatcaacttgattggattgaaggatggaaagtactgttccctgggggtgtctgtgagggtgttgccaaaggagattaagattttacttagtggactgggaaaggcagacccaccctcaatctgggtgggcaccatctaatcagctgccagcgtggccagaataaaagcaggcagaagaacgtggaaagactagactggtttagcctcccaacttacacgttttcccctgctggatgcttcctgacctcgacattggaatccaagttcttcagctttgggacttggactggcatctttgctcctcagcttgccgacagcctattgtgagacctcaccttgtgatcatgtgagtcgcttatccttaataaactcccctttttatatacatcaatcctatgagttctgcccctctagagaatcctgactaatacaggggggaaaacatgggcagggtatccaggtctgctttttgggctggggcatgatgaggctaaaggacatgtcagttcttttttttttttttttttttttttggagacagagtcttgctctgtcacccaggctggagtgcagtggcgtgatctcggctcactgcaagctccgcctcccgggttcacgccattctcctgcctcagcctcctgagtagctgggactacaggcgcctgccaccatgcctgatgcctggctaagtttttgtatttttaatagagatgggatttcaccatgttagccaggatggtctccatctcctgaccttatgatccacccgccttggcctcccaaagtgctgggattacaggcttgagccaccgtgcccagccaggacatgtccgttctaaactccaggcccctggtctgtccctccgatacctcctcttacaccatcctcagacacacagtttcttttcttttcttttcttttcttttcttttctttgagatggagtctcactctgtcgcccaggctggagtgtggtggcgcagtcctggctcactgcaacctctacctcctgggttcaagcgattctcctgcttcagcctcctgagtagctgggactacaggtgcctgccatcgcacccagctaattttttgtatttttagtagagacagggcttcactgtgttagccaggattgtctcgctctcctgacctcatgatccacccacctcagcctccctaagtgctgggattacagggtctcccagctaataaatggcagggcagggctttgaacccaggcagggcaactccacagcctatttccttaaccactgtcccataaggcctcccaaggccccagtgagcagggcatgactaaacatgcagctacatgtcagaaccctggagtcaggctcagggacacaggaccaggtgacaggcacaggacacaacctcccatgtgacatcacgcttggctacacacactcttgcaaagctgcagggtgactcatacaatgtggtcacaccatgatacacacagcacatgacactgaaccagataggtacaaccacaaagatccagtcacatggtaaattacagtgatatcataatccagaaacagcctcggatgaatggaaatgcctattcaccccaatacacaaaaatcacacaagtacagccacacaagcacccccatacacacgtcatacgggcatgtaaacttagaagcaaccctgtctgcttgaagacggtgacactttgggacatacacatcacacacgcaaagccatggaccaaattgtgtccccccctctccagacttatatgtcaaagtgctaagccccaagatagtggcatttggggctgggacccttgggaggtgaggagggttagctgaggttgtgagggtggggccttcatgatgaaattaagtgccctaatatgaagaggaaaagagggagagagaattgaaacctgctaaacctcagacttggactttccggtctccagaatggtgagaaataaatttctgttgtggaagccacctgtctgtgttatgttgttatgggagccagagaagactaagacacacacacttacaccactctcccaccacacacacacaacacacacacctgtgacattgtggacgacatatcccaggagcctggtgcagggggtttctgctgtggtcatcaggttggcacctggtggggaggggattctgggattctttagccgtctcccttctccaccctcccacagaatctctgggcagcaacagccataagggatcctctccaccttaggcggtgagaccctgaaaccataacctagggcagaatttctcaacctggccgctactgacacttctgattgaatcattctttgttgtgggcactgccctgtgtgctgtaggatattacgcagcatccctgccctctgcccactagatgccagtagcaccctccttgccaagtcatagcaaccaaaaatgtcccactgtccagtggtctctgggagaagtcagtgttagcaacatctggaatgagagggagtgatggggagctggagagatggaaactcagagtgcaagaaaggcaaagaaagtcagtgacagaaacagagaaagttagatagggatagagacacagagacactgatacagagacaccaagatggaggctgggggagacagagtcagaaagctaggatggggaagatggaaacacaggcacaaagagttctcagggtcagtgagtctgaaaggtatggagacggaaatacaggtgttgacagcagacacagcctacagcctctgtgcccaggcattgttctaagcacttgacatgcagtaattcactttcataggaaccttacctggaagatttgattattagccccatttcacagagttaagtatcagagaggttaagtaacttgccgaaggtcacacagctatcagcagtttattccatttttactgctgaataggattccattgtatggatgcaccatggtttatctgtccactcgccagtttatggaacgtctgtcactgctttaacactgcaaacttccctctccccaatcttccttattatttaacttattatatatgatttgtactaatttacaatattatgttaacacatataaatgtatatctaatttgttatttattttattggatgtattttctattgtttgtatctttcagctacaacaagaacaaggatctttgccagttttgttcactggtttatccaaagcccctaaaaccctgcctagcacatagtaggtacctgataagtacttactgaataaatgagaatgaatggatggccacaaactctttctatcactgtatttctcagttgagcttctcggtcagggtactgcctctctggctgtttctgtctttgagacagacaactaacacacacacactctctctctctgtttatatctgtctctctgtggctgacactctctccatcactttttcctgtctctttcagtagatctctcactggagagatctcttagtctctagagggtggttggggtcttgtcaggggtctggggttgggaatctagagcagaggaatggagtttggaggctgggtctgaggtctggagtcaacctccagaatctccagtttgtgctgtggaatctagagcttggaatctgaattctgggattttggggtttggagtgaagcatctggaatctagacgagacatcagcaaactatttctgtagaagtccagaaagtaattatgttaggctttgtgggccagacagtctgtgctgtaattgctcatttctgctgtcccagcataaaagcagtcatagacaacacaagaaggaattaatgtatgttccaacaaaatgttatttacaaaaacacacagcagctggatttggcctgcaggggtgatttgtttacttctgattaaactggaacctggaaaatggaatccagaaatggaagtcttggttctagagtccaaagactggtctgatatctagagcttggaccacaagtctgatctccaggaagatgaagctcaaagtctagaatctgaatttggtgactgaggtcctcattttggagttaagatttttttatgtagatcacaagagactgtcacttcattgcagtacagtttagccctgaaattggggtttagccaaggagggttcttggcttcacttaggaaaggattcaagggtgctggtagtgtgagacagcaattttcgttgaatggtgctgctccttgcgaagcagggctaactcataggcaatgtgcccagagtcagccacctatgggctcttggcaactatatttatactcatgtaaatccactttcaattacatgcaaattaagtaatgggtcaatgtaaattgaggggtcatttatttagaactttctaggaaaagagcagtaacttccaggtcattggcatggaaaggagcagtaacttccgggtcactgccatggaaaggggaggtaacttctgggtcattgccatggaaaggggaagtaactttcaggtcattgccatgacagtttataaatgccatgacactggtgagggtgttctataccaatgagcaatgagagcagatagggatcacttttgtcttcatctggtcattcctgctggttttttttttttttttttttttttttttttttttaagatggagtcttgctctgtcgcccaggctggagtgcagtggcacaatctcggctcactgcgagctccacctcccgggtttacaccattctcctgcctcagcctcccgagtagctgggactacaggcgcctgccaccacgcctggctaattttttgttttttagtagagatggagtttcaccgtgttagctaggatggtctcgatctcctgacctcgtgatctacctgcctcggcttcccaaagtgctgggattacaggcgtgagccaccacacccagcctttttttttgtttttttgttttttttgaattttatcctgcctggacttgttttggtcagcagggttgtgaccagaaaacaagtcctgccagtctcctacctgacctttataaaacattgtctggataatcatgaaaagtcgtttggtctagttgtcagtataacacagagagagaggtcttcccttcctaccactggggactcctgcctgctccctgtgactcaacatgtttctacccaactaactgaggtctggcatcgtcctatggagttgacctgaactgtctgtcttttcttcagagcaaggagtgccgcaggggcccaggtgtcaccattttgttattataggcaacccctccaggctgcttgtagaaccatctaaggcaaaattactgatcaagttcatgtctatccaggtaaacctgagatgagtaaaatgacctgtccatccattcactaaggtcttatgaactgtccactcatcccctgaggtcctatgaatgtttttttcttttagagacagggtcttgctctgtcacccaggctggtgtgagcatagctcactggagccaagaactcctaggctcaagcagttctcctgcctcagcctcctgagtagctgaggctataggtgcacaccaccacacccagctaatttaaaaaaaattgtagacatggagtcttgctatattgcccaggctggtctcaaactcctggcctcaagcaatcctcttgcctcagcctccaaagtgctgcaatgcctggtgcctgtgaatttttttttttttttgagacaaagtcttactctgttgcccaggctggagtgcagtggtgccatcttggctcactgcaacctccacttcctgggttcaagtgattctcctgcctcagcctctctagtagctgggattacaggcacgtaccaccaggtctggctaatttttgtttttttaatagagacagggtttcgccatgttggccagactggtcttgaactcctgacctcaggtgaaccgcctgcctcggcctcccaaagtgggctaggtttagatttctatatgtagaaattgtatagataggttaatagtgttatggaaatttatgtcctcattcttttttattgtggtaaagtacacaaaatataaaatttacaattagtggcatttaggacactcacgatgtacaaccctaccagtattaatccagaacatttttattaccccaaaaggaagccttgtacacattagcaatcactccccactccccccgagccccagctcctggcaattgctaatctgctttctgtctctatggatttgcctattctgtatttcatataaatagaagcataattcagccacaagagatggaatggaataattcagccttttgtggctgaattatttcacttagcatcatgttttcaaagttcatccatgtttagtatttcattcctttttgtgactgaatattcattgtatgaatatgccagaaattacttatccaatttactagttttacctgttggattgattgtttccagttagatgctgttataaaaaaaaaagcttccatgaacatatatataggcgcacatatatagagtctaaatcattatatatatcctatatattgcagatatgcataagtttctttagtgcgtatactcaggagtgaaatttctgggcattagatatgcatatcttggccaggtgtggtggttcatgcctgtaatcctagcactttgggaggccgaggcaagcagatcacctgaggtcaggagttcaaggccagcctggccaacatggtgaaaccctgtctctattaaaaatacaaaaaattagccaggtgtggtggcagatgcctgtaatcccagctactcaggaggctgaggtatgagaatcgcttgaaccagggaggcagaggttgcagtgagccgagatcgtgcaactgcaatccagcctgggcaacaagagcgaaattccgtttcaaaaaaaaaaaaaaaaaaaagatatgcatatctttaccatttctacttgaggtcatggaaatatcctcctaaattatgtcctaaaagttacattgtcttgccttaatcaggtctaatctacttggaactgatttccgtgtgtggtgtaaggtaggagttcaatgccattttttttccatactgatacccaattttcccagcaatacctactgaaaagacattttctccactgctttgcagtgtgatttctgtttcacataaagtgcctataaatgcataggtctgcttctggctctgggttctattctattggtatgtttgtctatgtctgtgctaatatcacacttctcgtgataagttacaagtagaaaaggctaccctccttgcttttctttggaagtgtgctggctgacctttgcccttgccctttcttcttcataaattttagaaacagtctgtcaggctccagaaaaatcctgctgagattttggtttggaatacattgaattttaaaataaatttggagatatttctcctctttacaacattgagttttcccctccgtgcacatggaacaatatatctctccatttattttggtctttcttttctttctcccctcccctcccctcccctcccctcccctcccttcccctcccctaccctcccttcccctccccttcccttctcttctttcgagatggagtcttgctctgttgcccaggctggagtgcagtggtgcgatctcagctcactacaattgtcgcctcccgggttcaagggattctcctgtctcagcctcctgagcagctgggattacaggcgtgaactgctgcgcctggcctttggtcttctttaatatctctctatggtattggatatctttgaagacttatttttagggtcttcatggattttacattttttgattttttaaaattttgtggcagttacatagaaatgcagttgattttttattcatttgcttccaacaatcttgctaaatgatatgattatttctataattatttattgattatttgggactttctgcattcacaatcatatcaactaaaatgttttattattatttttttgagacagagtcttgctctgttgcccaggctggagtgcaatggcgtgatcttggctcactgcaacctccgcctcccaggttcatgtgattctcctgcctcagcctccagagtagctgggattacaggcacatgccaccatgcccagctaatttttgtatttttagtagagacggggtttcaccatgttggtcaggctggtctcaaactcctgacctcaggtgatctgcccacctcggcctaccaaagtgctgggattacaggtgtgagccaccacgcccggccagctctttttcttctataattatgtgcttatggctgcatgtttctctccgagcactgtagtaggcatacgcaatacatgtgtatacatctggtattttccttagcatttaattccaaatattttctaatttccattatatctcttgtttgaactctgggttctttagaggtgttcttttaaaatcaaaacgcacagtcctagatgagataactcagaaacagccagtcaaataccacatgttctgtcttataaatgggagctaaacagtgggtacagacaggcatagagtgaaataatagacactggagactccgaaaggtggaagcatgagagggggtgaggcgaaggaggaaaatgacctgttgggcacagtgcacactacttgggtgatgggtacagtaaaaagcccagagttcaccaccacacaacatatccctgtaagaaacctgcacttgcgggcggggcgcggtggctcacgcctgtaatcccagcactttgggaggctgaggtgggaggatcgcctgaggtcaggagatcgagaccatcctggctaacacggtgaaaccccgtctctaccaaaaatacaaaaaattagccgggcgaggtggcgggcgcctgtagtcccagctactcgcgaggctgaggcaggagaatggcgtaaacccggggggcggagcctgcagtgagcggagatcgtgccactgcactccagcctgggcgacagagccagagcgcgactccgcctcaaaaacaaaaaacaaaaaagtgcacttgcactccctaagaccattttgaaaacacatgaggattttctggttatcatgatttctagcttaattacattgtggtcagacaacatactctatatattccaacttggaaatttgttgagacttgcttcgtacctcagtaacaggttcacttttgtaaatgctatgtgtggtttttaaattgaggtaaagtttttattgaggtatgcacagtgtggcgttagagttcaatgagttttggcaaatgcatactcatgtaatcctcactcctgtaaagttatggaaaattcccatcacccgagaacgttcttttacccttattcccagtctgttttttttttttttacttttatttttgagatggagtctcactcttttgcccagactgctgtgcagtggtgtgatctcggctcactgcagcctctgcctcctgggttcaagcaagtctcccacctcagcctccagagtagctggaattacaggcccccaccaacacacccatctaatttttttttttttttttgagatggagtcttgctctgtcaccctggctcgagtgcagtggcgcgatcttggctcactgcaacctccacctcctgggttcaagtgattctcctgattcagcctcctgagtagctgggattacaggcacctgccactatgcctggctaattttggtatttttagtagagacggggtttcaccatgttggccaggctggtcttgaactcctgcccaccttgtcctcccaaagtgctgggattacaggtgagccaccgcacctgaccccaatctgtttctatacctattcccctctcccatcccagcaaccaggccacattgaataattttgcctgttctagaatttcatataaatataatcatatagtgtatcatattttgtgtctggcttctttcactcagaataatgattttgagatgcatgtatgttgttgcttatatcaatagtttatttctttctggtgcagagtagcaatccattgtatggatatatcacagttcgcttatccactcacttactgatagacatttgctgcatttccaatttcattattatgcatgaagctactataaacattcttagggaagtgttttctatggctattacctaaatacctaggagtagaattgctagccgtcatgtggatgtatgcctgtctttctaagaatctgccaagctgttttccaaaatggttgtagcattttaccccctacccccagcaatgtaggagagttacagctgctgtagatataaccaagacttgatgctgttattcttttcaattttagccattctggtagctgtatgtcttttgaaatgattctatatttttcagatactgggtgcaacattccatatatgaccattaaatagagtatgttaatcatactgttcaaattatctatatacttattcagtctcccatctccttgcccctcagttgccccattgtgcccctcaaacttccctctttctactccttggtctctgttgctgtcactcacagtagccctcgccacaattctccccactagactctagctgcagcagccaacttctgagacacatgcaaattaaaaattcttgaaatgcagttaagaagacaaaaatgaatatagatcaactaaagctgaatagttaaactaagcaagaaaatctctacggttaccatttgctgacctgacttttcagaaactggacaacatccatggcactggtttctcttaactatccagggaatggcccctccctctgaaactctgtggccctcctggtcaaagctcgcatttcccagatagggaaatgcgacccatggagggaaagccatttgctggaatctcttgaatggaaggggaagcaaggaggacactacaaacagaacctgcgcttctcttagactttatttctggatctaggggaaagggacaaaaaatgaaaaaccaactggtaaggttgggtcaacgtgccacaagggggcactgtgtacagggagagtctaggtggcattggaccgctgggtctgagggaggaggggctgggacctggacctctgggtctggggaaggaggggttgggggcctggacctctgagtctgagggaggaggggttgggggcctggacccctgggtctgagggaggaggggctggggggtctggactcctgggtctgagggaggaggggctggactcctgggtctgagggaggaggggctggggggtctggactcctgggtctgagggaggaggggctggactcctgggtctgagggaggaggggctggggggtctggactcctgggtctgagggaggaggggctggggatctgtacccttggtttgagggaggaggggctgggggcctggactcctgggcctgagggaggaggggctgggaacagatattcctgaattccttccgcaggatgtatttgggggtcaatttcatgggttcccagtccccagagttaactggcctggacggttttctctatccactcagtgaatttgcagaggttggtgtagacacctggcacgccaacttggccacacggggcttttccgaaagacacaaggccctgcaagtacccgttgcagatcaggggccccccagagtcaccctgttgtgaagagagggagagtcagaattcaaaacacagagaggtggaaatggatgtgggctcagaaaggaactaaatgagactgagaaacaaagacagaaccatcatcaataacaacatagcccagcaacatatctgttggaagtcccattccagatccctgacttcatctaatcctgcttcccgatgtcctatgtcctgaatgctggctgcttctcttgggcttgtggtctgtctgtttctgtttgtctgtctctcctttgtctcctttgtggcttgtttatctgtctcagtgtctctgcatctctttgtaaagtcttttttttttttttttttttgagacagagtcttactctgttgccccagctggagtatagtggtgtgatctcaactcacttcaacctctgcctcccatattcaagcaattcttctgcctcagcctcccaagtagctgggattacaggcgcctgccaccatatccagctaacttttgtatttttagtacagacaggatttcaccattttggccaggctggtcttgaactccttacctcaagtgatctgcctgcctcgcctcccaaagtgctgggattacaggcatgagccaccctgcccagcctctttgtagagtcttgatttttcctgtttctcttcgtgtttcacctctatgaatctgtgtcactgtttccctctgggtacacagttgacccttgaacaaccctggtttgaactgcacaagtccacttatacttggattttttcaataaacacattagaaaaattttaggagagttgcaacaatttaaaaaaattcacagacgaactgtgtagcttagaaatatcaaaaaattccaacaaaggtatatcatgaatgcataaaacgtatgcataaatcgactatttatgttattggtaaggctccccgtcaacagtaggctatttctagtcaggtttttggggagtcaaaagttataagaggattttctgttgggtggaggtcaccgccctcaggccccatgctgttggaaggtcaactgcatttctatgtgtgtgtgtttctgcctccccatgtctgtttctgtttctctcttcctttgcttctctttattcctgtgtttatttctctgtttctctcagtttctctctctagttgtcactgtctccctgtgtgtctctccatctctgcatctcgccatgcggccctgtgtgtctctgtctcccccttctccacccttccctgagtcgcctgccctcccctttcccctctctcacgttgcaggagtccttctggtcttgccctccgccggcgcagaacatgctggggtggtacagcgggtcatagagcttactgcagacctcctcagacaccaccgacacgttcacgcactgcagcacggtaggcattctgcctgggacgcagagctctgggtcagcccccgcgactgggcagaggacctccttgaagagggcagacacacacccgtgagctcaccgttcgccagcagaccccagccagaaacgaggcaagagttccccgcggtagggcactgcgaagcaatgctgatgctccggatggtgtcagactcggacacggattcgtccaacttgatgagcatgaggtcgttagcgagcaagggtctgttgtactctgggtgccgtacggagaggctggcctccaccatctggctccctggctcttggtcggcctcaagactgtgcaggcccagcccgatggtgtaggagctgtgggccacggagggcaggtcagttttgtggcaactacatccttacctccattctcatcttcaaccccattcccatccccatctcctaaccccaaccccaccctcttcgctaaacaccctaagagctacttaaccatggtctcaaatcctcattcacaaaaattcagggacaagaacttgccttagttcactagagactcagcactgggctgagatttcaagtcaggactctctgagtccttccgaagcaagattcccgcctcccagcccttccctctggggctccccggatccaggctcattccgtcctcctcccagagccttcaccgctgtttccccctgagcaccccaagatgagcctgatattaggccccgcccccggacccaggccctgcccactccccctacctctgcactcacttctggaaacagtgtgcggctgacagcacccactgcggatgcaccaggacgcccgagcagaacaattcgttttccatgaccagtgccgcctgccagggctgcgagtgcgggctgcagtcctcgccgtttatgatttggctgcagctaccagagacgagcgatcctgagggcggagtcagggatgggatcgggaccaggaggcgggcccagggttcctgggggtgggcttaccgagcaggggcgtggtcagaggttcaggagcagtcagggctcctcggggcggagtcagggctgggaacgggctcaggaggcgggcccagggctcttgggggaggggttaccgagcaggggcgtggtcagggcttcaggagcagtcaggactcttggggggccgagtcagggctgggggcgggcccagggggcggacccagggctcctgggggtggggttatggtgcaggggtcatgatcggagcttcaggggctggtccaggatataggcctagggctcccaggggcggtgatcacggtgcaggagcctggtcagggattcagggtagtcagggctcctgggaggagagtcagggcatgggggtgggctgagaaggcgggatcagtgctcctagggttggggttacagcgcaggggcgccatcaaggcttcaagagctgggttatggctagaggcagtctcagaaggtgggaccagggcttctggggcggagtcagggctctggggtgagctctggaggtgagactggtgccatcgcggtgcaaagccacggtcaggaggggttcaacagaggagtctaggctcatagcagtaggatcgggtccttcggggtgaattaaagctcagggggtggagttgttgctgggagcaaggatcgggtcacttgtctgcgcagactgatgctcaaagagtcggtcctgcgccgagtcactcctatcctctcccagccttgcccacagtcacaccaagccacaagcccatgcacaccaaaacaccgttttatagtcctgtgaggtgagttccttggggatgggagagggggatctcaggactgaagacccaggaagcaggcacagattcccagcaatggatcacgccccaggaagcacaatctcctgcaccctcggcttcccctgtccccatatcatcattacactgttgtcactccaccagatattcagaggcacaaactgtcagagtctcacaggtacaaccacacacccaggcacactgccacacacaaatttaccacgatacaaggagttgcaggggcacagccatgggggacggataacacggtaccgtctcacaggcagctttgcagtcacaagcaagaggacactgagtcacacctgaacattaacaaacactgtgcccccaagcacggacagacacacacacgcatactcagatacctgcgacaccaaggatgaggtaccccaggaaccagccccagggatttcctgctgtggccatcacgtcagcacctggggatgaggactgagacttagccgtgtctggggatcttcagcccaagtctctccatccctctctttgtccctccctttcttccctctgggacgttattaggtaggcaagagcctagaccatctaccccctctcccatccatggacccagaacctagagagacagatttagagactgagagagaaaaagagagagagagatgggaaaagagagagagagagagaactaggtagaaaggaaagtttagagaaagcatctagccatctgtgaatggggagagatggtgtctagccacccacaaacaagcatggagggaagacacacagagaatcagagccggagagacagagtgcttgagagatatcctcagagacagtctgagagttagacatggagatatagattcagagagacagagagacccctaactagagacagtgactcctaactagagacagtgagagatctgtctagagagatgtggagacagaaggcacagaggctgagaatccagcgacatggagctgtagggagagttggatcatgaacactgcaggcttttagtgggggaccaccaggcctcttacccggccacctctgggctcctggattccactgctgggctgagctccagcctgctgcctcccgcaggggcctccttggggcttataagcatcctcagcctgggctggcctgcccccaggggatgtgttccaggggtcaggtgctgcaaacttccagctcaactctctcaggctgcctcaactctgaccaggcagtggttgggggcccagaaggggctggcagcagggtctagggacccagggaggagacccctgcccagatcctagactccactctcctttttctttctctctctctctctcattctttctcttttcatgttcttattctctctcatgagatacctctctcttgcctgtatctctcattttctctttctcttcttctttctttctctcattctctctctcattatttttctcgtgttttctttcatttcctctcattctctcctgttctctctcatgttctttctctttttaaattaaatctctctctctctctcccctcctccttcatccctctctttctgtgcttctccagcaaatttccccaggttcgtatccagcctacatcacgaactatttttggaaccttgggcaagtgactgcacccctgtgagcctgtttttccaactgtaaaactggagtgaccattatgccccatttcccaagtggattcaaagaggtaattcagggaaaggcacacagtgccaggcacattgtaggctctcggtgagcgggagaactaaaaagtcttcgctcagtgaaaagcagctgagtgcctaccacactccgagctctgcggcaggtgctggggccacaggaggaaccagcaaagtcctcgtcactggggatcgcgtcctacccgggggcacagaccataaaggaaaactgcagggaccagcatataaggtggtggtcggggagactcagagaaggggaacatttaagctgagatcccagggaagaggaggaggagggtcgccgcagcaggggcggttgcggggtgcaggggagaacttggctccagccagaggagggcagggcgggtaggagggcagggcgggtaggagcgcagaccgggaaccgggcgggcctgcaggagtttacgtaccaggattaaggagcttgggttttacttaagtgcaatggattttaagcacgaggatggagtgacataatcttatttactttttaaaaacttccagcttggagagtgatggtgggggcggggcggggggcagtggcaacagcccaggtgggaggtgacggggtcaagggagaagagaggtgaatggacacggggtcccctctgcatgtggagccaagttactgcccgatggatggaaagtggggggccaggagcagaggggccaaggatggcgtggaggcttggtctgctggcttgcgctctacggatcttgtggagacgcataggtgcgggaaggggggtggggggtgagagggtgccgtagaccgcggagggtgcacggaggggcaggccgaggtcaggactgccgagaaacagcggggactcatcaggggagaggtggtgtttacagccacgaggccgggtgagatcatccaaggagtgggtgggtgtagaccgcggagccggcgcgggtgagggatagtgcccgcaggtgaccgcgacgaggcaggaatgtctctgtgtctctctgtctctcctgggtctctaacactctttccttctccttccttacttctttcccccacagcccaccccgtgtgtctgtctctctttctctctggctctcttttcctctgcctctctggtcccatctctgtctctctcccccttgtctctgtttctctcacctgccagactggaagcatcccaagtgagaccctcccccaactctgtcctgggcccgtgcgcccccagataactctgggcaggacgggacataggctgggaccacagaacaggaagccctggcaggtttctgtctctgtctctcttttccctgtccctgtccctttctctctctgatcccttctctctcgctctccctctgacctctgtctgtgaccctctgatctctgtctgtctctgtctgcccctgtgtgtctctctttcctcctgtctctgtctcaccttgccttctctctctgtctgtgtctctgcacctgtgtctgtccatctttctctgtgtctctctcctcccatctctgtctctgtctgtggctccgcacctgtctctgtccatctttctctgtgtctctctcctcccatctctgtctctgtctctctgtctgtctccgcacctgtctgtccatctttctctgtgtctctctcctcccatctctgtctctgtctctctgtctgtctctgcacctgtgtctgtccatctttctctgtgtctctctcctcccatctctgtctctgtctctctgtctgtgtctccgcacctgtgtgtctgtccatctttctctgtgtctctctctcctcccatctctgtctctgtctctctgtctgtgtctccgcacctgtgtctctgtccatctttctctgtgtctctctctcctcccatctctgtctctgtctctctgtctgtggcttcgcacctgtctctgtccatctttctctgtgtctctctctcctcccatctctgtctctgtctctctgtctgtgtctccgcacctgtgtgtctgtccatctttctctgtctctctctcctcccatctctgtctctgtctctctgtctgtctccgcacctgtctgtccatctttctctgtgtctctctcctcccatctctgtctctgtctctctgtctgtctctgcacctgtgtctgtccatctttctctgtgtctctctcctcccatctctgtctctgtctctctgtctgtgtctccgcacctgtgtgtctgtccatctttctctgtgtctctctcctcccatctctgtctctgtctctctgtctgtgtctccgcacctgtgtctctgtccatctttctctgtgtctctctctctcctcccatctctgtctctgtctctctgtctgtggcttcgcacatgtctctgtccatctttctctgtgtctctctctcctcccatctctgtctctgtctctctgtctgtgtctccgcacctgtgtgtctgtccatctttctctgtgtctctctcctcccatctctgtctctgtctctctgtctgtgtctccgcacctgtctctgtccatctttctctgtgtctctctcctcccatctctgtctctgtctctctgtctgtggctctgcacctttgtctctgtctatctttctctgtctccactttcctcctgtcttctctcatgttgctctgtctttgttttccatgcgcttccaacacttctcccttcgctctcttcattgtgtctcaactcaagtgttacttcttcagagcccttccctgagccctcccctagtctgattcagggtcttcactcccctatttgttttttcatcttatagcatcctacatgctcctttagagaatttggtacaatgtatacacgtattattatgtgtttctttttctttttttttcttttttgtttgtttgtttgtttctttgagatggagtctcactgtgttacccaggctggagtagagtggtgcgatctctgctcactgcaacctccgccccccgggttcaagcgattctcctgcctcagcctccccagtaactgggattataggtgcctgccaccaattctggctaatttttgtatttttagtagagatggggtttcaccatgttggctaggctggtctcaaactcctgacttcaggtgatccgcccaccttggcctcccaaagtgctgggattacaggcgagagccaccgcgcccgtcttgtgtgtttatttttctagtagctgtttctttcattagtgtgggagccccttggggacagggctggtgtctgttatgttcactgataaaaactattcactgcagatgtgttgagtggatggataaagggagatacaaaaatagagagagacagacaggagagggagagatgaaggctgacggagagagaaaataacaacagacaacaatggtagcttactattaattaacctttagaatatgttaaattaattgtaaggaggtcaagaacttaccttatgtctggccctcttctaagtattttaaatgcaataacaaatgtattcctcaaaaaaatctaagaagtagatgctgctatgaactttgtttgacagatggagaaactgaggcacagagagggtaagtagtttaccaaggtcacagaaagactgaggccaaaagagaagaacagacagaagtgggtagatggagagtaggagagagctgggaacacactgagagatgtggccaaaaagataggaagacgctgaaagagagacacgtctcaggaattaggaataatcatcactttaaaaataataaaatatcaggttgggcgcggtggctcacgcctgcaatcccagcactttgggaggctgaggcgggtggatcatctgaggtcaggagttcgagaccagcctggccaacatggcaaaaccccatctctactaaaaatacaaaaattacctgggcgtggtggtgggcccctgtaatcccagcaacttgggaggctgaggcaggagaattacttgaacccgggaggcagaggttgcagtgagtcgagatcgcgccattgcactccagcctaggtaacaagagtgaaactctgtctcagaaaacaaacaagtaataataataatgataaaatatctaacatttatctatcacctctcttctagttgtcatggtaacaattttatacaagttaactagttttaattttcataactccctgaggtactcatcattattcccaatgtgatgaaagaggaaatgaacgcacagagagggcaagctacttattgaagatcacacagcaaagcagccatgcacatgggctgcctgaccccagagcccatatcttgagctgttatgccacctctctctataagtcaggaaacagaagctgaagccaaaggacaggtgggccttcctgtagatacacaggtcatgggggcccaccctggcccactatccatcatctgagtcatctgagttcacccccacctgcggatgagatgcagcctcagccagagaagccagggagtattgctggggaggggagggaatgcggccacagacggggccacccgcccaccgagagagcccgctcttactgtataactggaagaacaagccccttctacctcccatccccctgggggctggctgagccacaagaggcatgaatctctggatgcagtggtgccgctgcactaaggccccgaggcagccccagccatctctgctgaggtgcccagagcagcccttagggaactgacccctgagttttcctcagtaacctcagggaactcctgtcggctggatttgaacaaacctcaagggtggaagaaggcatcactcttgctttttttttttttttttttttttttgagatggagtctcgctctgtcgcccaggctggagtccagtggtgggatctcggttcactgcaacctactcctcccaggttcaagcaattcccctgcctcagcctcccgaatagtggggattacaggcacacaccaccacacccggcccatccttgccttttattcaataacataaggctaccttggggcagattgtattacacaagaaaagtcttttccttccttagtatggacgataggatattcagtaggaagaaaactcaaaagtcctggtgtgagtggctccttttcctgctccggtctcaagaggagagaggctgggactgaatggtgcaatcctgggatctcctccagaagtggggaggaggatggagagacggactttgggagaaggaaagatggagctcactccagcatgagggaggtgcagggaggcagagagaacacagcctgtttgccagcaagatgggaggatggctgtgggctggggggaccactctggggaggatcttctagccactctgcagcagcaagtagaagaaccccagtaaataataaaggagggctgggcacagtggctaacgcctgtaatcccagcactttgggaggctgaggcagatggatcacttgagctcaggggttcgaggccagcctaggcaacatagcaagaccccgtcactactaaaaataaattagccaggcatagtggtgcacacctgtcgtcccagctactcaggaggctgaggcaggaggaggatcgcttgagcccaggagttcaaggctgccgtgagccaagatcacaccactgcactccagcctgtgagagcaaaaacaaacaaggctgggcatggtggctcatgcctgtaatcctagcactttgggaggccaaggcgggtagatcacctgaggtcaggagtttgagaccagcctggccaacatgttgaaaccccgtctttattaaaagtacaaaaaattagccgggcttggtggtgcgtgcctgtaatctcagctacttgggaggctgaggcacgagaatcacttgaacccaggaggtggagattgcagtaagccaagatcacgccactgcactccagcctagcgacagagtgagactgtctcacacacaaactcaccaaaaaaaaaaaaaaatatcaccccaaaaccccacaaaaaccaaaggagcagaagttatgatggtggcctcattaaccaagggcctgggcatcccccatttttctagcagcaaccaagctgagtcatcagacatcactctacagaagaaggaggatggatgggaccccaaagtagctgtgacatttcttgccaggcagatggggacaggggcagtgggcctggagcagactgaaatcaattaagatctaattgtgcaggccatagtgggcaggtgtggtcaagggactagcttttaaattttatttaggttttttttttttttttttagatggagtcttgccctgtcgcccaggttggagtgcggtggtataatctcgactcactgcaacctccacctcctggattcaagtgattctcctgcctcagcctcccgagtagctggaaatacaggcacacgcaaccacacctggctaatttttttgtacttttagtagagacggggtttcgccatgttggccaggctggtctcgaactcctgacctcaagtgatctgcccaccttggcctcccaaagtgctgggattacaggtgtgaaccctcgtgcctggccttatttagttttaattaatttaaatgtaaacacccacacctgattcagttattgggagagttttaattaagtatgtttggaacaacgtgggtgcgtgaatcatctttttcaactctaaactttctgggctctgaatgcagatcaaatatttctgaaaaaacttagcatccaaattgcaatgtgctgggagtgtaagtatatacactggatttcgaagaactggtgtggaataaagaatgtaaattctcttactgatttttttttacattggttacatgtggaaatgacaagtttggatatatcaagtttaatatgttactaagattaattttacctgtttctttttcctttttaaatttatttatttatttatttttgcagaaacagggtctcactagttgcttaggttggtcttgaactcctgggctcaagtgatgtgcctgcctcagcctcccaaaatgttgggattacaggcgtcaggcactgcacctggtccaggtttcttcttaaatgttccctcctgaccacctgtctagaatggctccatctctttaccctgattttattgttatcaagtatgtaagtctgtattcatttcatttcccattgctgccggagtaactaccacacgcttagtggcttaaaacaaaagagatgcattctcttacaattccagaggtcataagtccaaagtgtctaaagtgggctaaagtcaaagtgtcagtagaactgattccttctggaggcttcagaggaggctctgtttcacccttgtttccagctttaagatgtcacctgcctaccttggctggtggccgcatcctccatcttcaaagccaacagtcgcctgcatcatcctgacctccgcttcatgtactcaccctccttctctgactgactcttctgtctccctcttatgggtgatcaaggtgatctttgtgatcacctggagccccctcgggtaatccaggataatctcctcatctccagatcatccacttaatccatctgcaaagtctgttctgccacgtgaggtcacatatgcacggggtctggggattgggacatggacatctttggagagggggtattattctgtgtactcaaaaatcgcggcatattcagtgatttgctcgtttattgtgcctgcctctgctagaccataagctccatgaggaacaaaacatgaccctgtcagggtcaccattgtatccccaatgccagggacgatgcctggcacatagtagttgatcagtaaacattcactgaggactggcctggtgcggtggctcacgcctgtaatcccagcactttgggaggccaaagtgggcagatcatgaggtcaggagatcgagaccagcctggctgacacagtgaaaccccgtctctatcaaaaatacaaaaaattagccaggcttggtggtgggcacctgtagtcccagctactcaggaggctgaggcaggagaatggcgtaaacccgggaggcagagcttgcagtgagccgagatcgtgccactgcactccagcctgggcgacagagcgagactgtctcaacaaaacaaaacaaagcaaaacaaaaccattcactgaggacaaatgttccaaggacagaaaaattcatgctcttatgaacaagtgatttacagtaacagaaaccgttttgaaattggcattgcgttttacactgattaagagacggactctggaatacacacttgtcatagttcaaatctctgctctgccattcactagccgggcaaccttaggcaaatcgtactttctctgtgcctcgattccttatccgtgaaatggggatagttacagtagttgtctcatagaatgttagaaggattaaatgaattagtacatacaaggcagttagaactctgccaggcgcaaaggaagtgcttcataagcgttagctttcattgtcattgttaatattattctgcaaatatctgaaatgatatttaacaaaacatgatgcaaacccaagcataggggattcgtttgtagttccaaatagattaaacatctcagcaacactttggaagattcttattgtctccaccttgagctcaccatgaactcaaggagcgagagaatacagtccgtacaagttgtgaatcctgaaaatctgagacaggtctcagatttttcagaaagtttattttgccaaggttgatgacgtgtgcccgtgacacagcctcaggaggtcctgacgatgtgtgcccaaggtcagcagagcacagtttggtttcgtacattttaggaaggcatgagacatcaatcaacatatataaaatgaacattggtttggtctggaaaggtgggacaactcgagcggggagggggcttccgggtcaaaggtagataagagacaaacggttgcattcttctgagtttctgattagcctctccaaagaaggcaatcagctgtgcatttatttatttattattattattattattattattattattattatttgagatggagtcttgctctgttgcccagcctggattgcagtggcgtgatcttggctcactgcaacctccacctcccaggttcaagtgattctcctgcctcagcctcccgagtagctgggactacaggtgcccgccactaagcctagctaatttttttgtatttttaatagagacagggtttcaccatgtcagccaggatggtctcaatctcctgatcttgtgatctgcccgcctcagcctcccgaagtgctgggattacaggcgtgagccaccgcaccccggccagatatgcatttatctcagtgagtagagggtgggtttgaatagaatgggagtctggtgggctctaagcagtgcccagctggacttttccctttagcttagtaattttgggggccccaagatttatttttctttcacgaactcatttcaaaactgagtctggatttcattctcctagcttgacaaattcagctgccaaattgctgattaaaagcagatttccttcttaaaggggaaagccatggtttttttctgaaaggagaggagaaagccttatcgtttctgtttcataaaaggaaactttcatgaactgcttcctggctcctctggttatggagtgaaattcattgcaatttcttaggatctctacccgggccacccacagagggctcttgaacaacatgcaggctgcagacacatctggcctgtctcgtagagtctggacttttttgtttgcttgtttgtttgtttgaatggatcacgagcattaaaaggtcaagagattgcaagtttctcttgaaaaggccacggtatcagtcaatatcacgcctgcattcccacgtggccataatccagcatcagcaggtgctgagtggccaccccgggggcaccctgtggttttccttggcccacacacagtcagcttccctcatttatacttcctgcctggccccaggaggtggctgagtttgtgacctcggtggagaaaaaagcatggacacacagagacatggatataaagagatcagagggaaagaaagtcacaaataacgaaacaacaccacaaaaggagtcatccatcaccctgaccatgaacatcatcatcatagctactcttgtaacgtactttatcttgtgccaggcattattctaggctctttgtaaatgtgaactcatttaatctccatgaggtgggaactattatcaccctcactttatagatttaaacaaagagtcacagagaagctcccgggttgtttgcagaaaacagcgggcaggtgagagcgctgggctgggcactccccaagctcggagcaagtgcgcctacaactgtgcaatactgccacctagtggagccggagagacatactcggggaggactaaaggttgtgggcccagggttctcttgcgccagtcaccctgggccgcagcatccggctcaggatccagaaacgggagcagaggtggcaggaagcagggctggccgccaccagagctttccacctggggacaccaagtcatggtcctgactttgggtctctcagatgtaaagggaggggttcaagcgtgacatcaggcgagggctgagtgtctggcctcatggtcggctttcctcagctgaggatagcgacatcgcatgggtttatgtgaagtttcaatggggacgtccacacaacacgttggacacacaagagcccggcaaatggtatctccaattattgctatgaatacaatgaagtcacatggtgaccttggttgcccttcgccatctcccgctccgctgtgcacccatatagtcaaataacaaccatgcagataataataataattaacttctcacataattgagtggctatagtcattttttaaaaatagagacagggtctcactacgttgcccaggctggtcttcaactccaggcctcaaaccgtcctcccacctcggcctcccaagtgctgggattacaggtgagtcactgcacccagcagattctttaacttgagttgttgtacttaatattataggataaaatcataagcctgtcttaaaaaaaaaatggtgcagggccgggcatggtggctcatacctgtaatcccagcactttgggaggcagaggtgggcggatcacctgaggttgggagtttgagaccagcctgaccaacatggagaaaccctgtctctactaaaaatacaaaattatccaggcgtcgtgctgcatgcctgtaatcccagctactccggaggctgaggcaggagaattgcttgaacccgggaggcagaggttgcggtgagctgagatggtgccactgcactccagcctgggcaacaagagtaaaactccatctcaaaaaaaaaaaaaaaaaaaaaaagtgcagatccccagcgctctcacctgccactctgttgtctgcaaacaatcaatttctgaattgatttctttccccatttgaaaaggaaatcagcttttctccgcaaaattctcactggctagatttgttagattggggaaaggtgagaagaaagcaaatctttgtttggttccacacttactgaagtgggagaacactgccgctaattggtaacacatgctaagtgtgtgtgctgtaccatagtcttaagggatttgcaggaatgaacttgtttatattcccagccaccctaggaagttgctactgtttctatcgccactataaataggaagaaactgaggcaaagggagattaaagttattttctaagtcaaggtgccatggttcacacctttaatcccacctttaatcctgggaggcgaggagggaggattgctttagtccaggagttcgaggccagcctgggcaatatagtgagaccctttctctattaaaaaaattttttaagtcattttccaaggtcacacagtaaggagcagccaggtttggacacagggactctggcacaagtgtgtgtgtgtaacatcatttctatttaattttttgaatagaaaatattttcggccaggcactatggctcatgcctgtaatcccagcattttgggaggccaaggtgggtggatcacttgaggccaggagttcaaaaccagcctggccaacatggcgaaaccctgtctctactaaaaatgcaaaagttagctagacatagtgatgcgtgcctgtaatcccagctacttgggaggctgaggcaggagaatcgcttgaacctacgaggcggaggttgcagtgagctgagatcgcgccactggactccagcctgggtgacaaagtgagactccatctcagaaaaaaaaaaaaaaagaagaaaatatttttacatggtaaaaaaatatgtttataaaaaatacagagtgataaacctccacctaactttgttccccaacctgtcctgtcttcatccctcttcaaaacacaaaaactagaatatgtttttttggatcatcttccaggattttgtggcacagggacagatgcatacaaagatgtgtttttatttttttttctcttgcctttagccaccaggctgggtttcgcaccaagaaacgtgtctcccggagcttagaccacttggtgaattctctttcttgttatcagaattgaagacctgtaatgcctggttagtgtcaaggtttgtgaaacactgtttggataattacacaagttataaaacaatagctggtgtgaaaattacagatgattcataattacacatatggctgtcaagctttctgctagagagtctttcagcctgcgagaactcagtgggaggaacttttttttttttcctaaagggatctcattgctcattctgcaatgattagagctggccagaaaatagacactggcaatacagcaaataaagtcgaagggaaaatgcaatcagagagatctaggaggacgacaatattttttactgagcacttccgatatgccagacacatttttattatgacattttattttgaaacagttcaaaactcacaaaaattgcaaactagtgcaataatgcccatgtacccttcatccagattctcccaatggtaacattttttataaggatagtacactgtcaaaactaggaaaacatcgttgataccatgctgttaactcacatagagaccttatttggatttcatcattttttacatctctctctctgtctctctctccaccccatccccaccatctgtttgtctctgtttctctctgtctctcttttcatgtatctagttcttatagctctatagataaaggtaaccatcaccacagttgggatacagaactacttcatcaccataaagaaattttcaggctgggcgtggtggctcatgcctgtaatcccagcactttgggaggccgaggtgggcagatcatctgaggtcaggagttcgagaccagcctggccaacatggtgaaaccccgtctctactaaaaatacaaaaattagccgggcgtggtggcgcacacctgtcatcccagctactcaggaggctgaggcaggagaatcgcttgaacccgggaggtggagtttgcagtgagccgagatcatgccactgtactccagcctgggcaacagagcaaggctccatctcaaaaaataaaataaaataaaataaaaaataaaataaaataagggaaatatttttaaattgcaattttaaagatattttaagttctgtggactatatggtttctgttatcaaccagtcaactctgcttcatcgaacaactcatactcaatacatacatgaataagcatggctgtgttccaataaaactttatctacaaaagcaaaacaaaacaaaacaaaagaccacctttgagttggtcacaaactttgtgaaacatcattgagtcagttgcgtaagttatacaacagtgactaagtgtgagaactagtgatgactcccttcattgttatcagtggagatagatgatgcagacctggcttatttcttaaggtgcactgtttcaaaaagctacaaaaactcaggacaagctcctaattgtgaagatgaacaatttcactcatcttggtctactgccttgcaggggtgttttggtagagtggtttctcgacagtttttcttgaaacccaaatccaaatccaaagctttgctgagtaatccattatccttgaaacaaccccgtgaagttgtactattattcttgcatttgtactattattcttgtattttggctcggaagactgtgtgcctagctgctctgctatcctgtctctgtccagcacacacatacacacacacgcacgcgcgcacgcacacaaatgtcaacattggtttcctctggttggtgagatcatggggtgttttttcatttttgttttttgagacagagtcttgctccttcgctcaggctggagtgcagttttgtgatctcggctcactgcaaccttcacctccggggttcaagtgattgttctgcctcagcctccccagtagctggaattacagtctcccaccaccatacctggctaatttttgcatttttgttagagacagggtttcaccatgttggccaggctggtctcgaactcctggcctcaagtgatctgcccaccttggcctcccaaagtgctgggattacaggcgtgagccactgcacctggcccaggctggggtttttattatcagaaactgctagactttttcccgaagcggttgaaccatttgacactcccttcaaccaggtatgagagttcgaggtgccccacgaagtgtgcaacatcttggcgttttcatcttatttatttttattgaatttattgtagttttttgttatttagtttttatttcataatcataaacttaactctgcaatccagctaggcatggaagggaacaaggaaaacatggaacccaaagggaactgcagtgagagcacaaagattctaggatactgcaagcaagtggggtgaaggggttctctcccaagctacagaaggaatggtctggtcgttaagataaaatacaagtcaaacttagagttgttcacagtcagcaatggtgatctccttgctggtcttgccattcctgggcccaaagtactccatggcctccacaatcttcatgccttctttcaccgtgccaaagaccacgtgcttgccatccaacccctcagtcttggcagtgcagatgaaacactgggaacaatttgtattgggtccagcatttgccatggacaagatgccaggccctgtatgctttaggatgaagttctcatcatcaaatttctccctgtagagggacttgccaccggtgtctttatggcgtgtgaagtcaccaccctgacacataaaccctggaataattctgtgaaagcaggaacccttataaccaaatcctttctctccagtgctcagagcatgaaccttttctgctgactttggaaacttatctgcaaacagctcgaaggacacgtggcctaagggctctccatcaacggcgatgtcaaagaacacggtggggttgaccgtggctgatagtacaggactcgcagcggcagtgtctgcaaagcctattttaattttttaaaaccgatctgatgggtgggtggtagcgtctaattgtggcttgaattggatttcctctcatgacgaaagaagttgagcattgtttcgtgtgctttatggccctttgtatgtctgctgttgtcaagtggacctgtgtacaccgagagctgacccactcgtgtatcagttctgtggggctgctgtaacgaactagcacaaactgggtggctttaaacaaaagaaatgtattctctcagagctctggagactgtaagtctgaaatcaaggtccccatggtgtcggcaaggccacacgccctcaggctctgcgtagagtctttcctggcttctgttgacggctgctgaccactggccttccctggctggcagctgcaatactccaatctctgcctctctcttcacatggccctctccctttgtgtctgtcttcatattttcttccctgtttttataaggacaccagtcatactggattaagagtccaccatactctagtaagacttcaactacttatacctgaaatgactgtatttcaaactaagatcacattctgaggtcctggcgattagaacctcaacatatcggctgggcgcggtggctcacgtctgtaatcccagcactttgggaggccgagacaggtggatcacctgaggtcaggagttcaagaccagtctggccaacatggtgaaaccccatgtctactaaaaaaaaaatacaaaaactagccaggcgtggtggtggatgcctgtaatcccacctacttgggaggctgaggcaggagaattgcttgaacgtgggaggcggaggttgcagtgagccaagattgcaccatccactctagcctgggtgacaagagcaaaactccatctcaaaaaaaaaaaaaaacaaaaaaaacaaaacaaaacaaaacaaaaaaacttcaacatatctttttgtgggggaacacttcaacctataacattatggattcagtagcctgccctttaaataatgtccaggctctaggctacatctcagatgcgtcagtgatgcattccaaaagtggtagtgttaccatgcaaccagtgggctcacagccccatgtgcatagaggccaataccatagcaccggcttttgagaaaagaaaaacttaattgcacgttgatcagcaaaaggacataggaggaaatacctgactctgtctccctgagctgggggctggagcaggttttataagcatggagtaaggaggcgtgatctgattggatctggcaataaggtgatgctggagaagcatgatctgactggatcctgccatggggtgacaccaaggctcaaatctgatcggatcctggatcctgccatgcagtgtcagcttcttaattcagtccctgctcctccatccaagcactttggttccccctgtggttgcacgcatggttcatctgggtgtactcaggttatatgacctgaaataccatggcaactgaaaaacatctcacaactttgttacataaaagtggaaccaggctgggcacagtggctcacacctgtaatcccagcattttgggaggccgaggcagttggatcacctgaggtccggatcacctgaggtcaggagtttgagattagcctggccaacacggtgaaaccccgtctctgccaaaaatacaaaaaaacatcgctgggcatggtagcacgcacctgtaatcccagttactcaggaggctgaggcagaagaattgcttgaacccgggaggtggaggtggcagtgagccgagatcgtgccactgcactccagcctgggcgacaaaagtgagactctgtctgaaaaaaaaaaaaaaaaaaaaagtgaaaccagattggtctgtgccaactctggggcaggcactgtgcatgaggtggaattgtcatcttggtgttacaggtgaagagtgtgacctatacaccatggctcagagaggtcaaggaacttgcccaaaactagacagctgggaatggctcgcaggattgtaggactccaaatttctttttctttcttttcttcttttttgagacggagtctcgctctgtcacccaggctggagtgcagcagcacgatcctggctcactgcaacctccgtctgccaggttcaagcgattctcctgcctcagcctcacaagtaactgggattacaggcgcccgccaccacgcccggctaattttttgtgtttttaatagagacggcgttttgccatgttggccaggctggtcttgaactcctgacctcaagtgatccaccggcctcggcctcccaaactgctgggattaccggcgtgagccaccgcgcccggccctggattccaaatttcatgcccctcccacaactttcccaggtcccagttcagttcttgcaaaggcctccaggtggcgcgatagagcaaatggtggattccgctaacttgggtttacaatttcttcctgggaggcttgcagggtggggcacttacttgaacgtgcacacgaaacaccaggggatcttatggaaatgccgcttctggttcagttggtctggagtgggactgtgttttttaatatgcttccagggcatgtcgcttcagctttgagcagcaagagcttcattcagtgggataaacagccctcgccacacctgtgcaggcagccaactccagaacagtaactaatgacgttcatgacaatcacagaaacaacgatttccacatgtttattctgtgccggcctctgtgttcttgtctttgcctttatgcgcattctctcctttaatgctcaaggcagtctcatgaagtagcatcattttacagaataggaaacaggtaggattgaaccagtctgtgtctattgcaccccttccctttttcctacaggatagatgccatccctgggggactcagcccaaggcatgggggaagagaggcccgggctctgggggattggctgcaaggccaagcggtgggacgaggccgcttaggcagcgggattgtggggattaggaggaagagtgagatcaataatatgcaaagggccgggcacggtggctcacgcctgtaatcccagcactttgggaggccgaggtgggcagattgcttgaggtcaggagttcgagaccagcctggccaacatggtgaaaccccgtctctactaaaatacaaaaaaattagccgggtgtggtggtgagcacctgtaatcccagctactggggttgggggtgttgctgaggcaggagaatcacttgaactcgggaggcacaggttgcagtgagctgggatcgtgccgctgccctccagcctgggcaacagagccagactcctctcaaataataataataataataataataataataataataataataatataataaaatagaaagatctgcaaagtaaccccagatcctgcactacctcccttacaactctcaccaaaggaatcctttctctctctctctctttctctctctctccctttcatttctccctctctgtttgcccttctctttccagatctctctctgggtctctttctcttcatctctcctcctccctccctcctttccttcctcaatcctcttgctctccctatgtccttcttccatcactttctctatgatcagtgtttcagtctcttctctctctctgtttctctctctctctttgaatgtcaccaaagctagctcttcccctctttctgaatctttctctaccctccccacccccagtctctttaaacttgagtctttctgttgaggtggtatgagcctacagtcccagctactccagaggctggggtgggaggatcccttgagcccaggagtttgagtccagcctgggcaacatagcaagattctgtctccaaaaaaaaaaaaaaaaatctgagtctgtttgtctcactctccccaagtttctctctttaagtctctctgagtccatctgccttaaatctattccagtatatctctctgttcctctctttcttccttttcctcccttcctctctccctccttcctctcccctccaaatctgtctctctccatctctctctgtctttacatctgtttgagtctctttcttttcttttctttcttcttttttcttttcttttttttttttgagatggagtctcgctctgttgcctaggctggagtgcaatggtgcaatctcagctcactgcaacctctgcctcctggattcaagtgattctctggcctcagccttctgagcagctgggattacaggcacccacctacatgcttggctaatttttgtatttttagtagagacagggtttcaccatgttggccaggctggtcttgaactcctgacctcaggtgatcagcccgcctcggcctcccaaagtgctaggattacaggtgtgtgagtcaccgcacctggccaagtctttctttctttaaagttctcagagtctccctacttcccccattcctaccccttcacctcacatccttatggctttggccctatgtacctatgtttgctttcgctggctcaatctagtgttgtggttaccggcacgggcttaggactcctacgcccttgactcaaattccggctctgccaagtaccggctgcagaaattgagccaaatgcaccaaacctccctgctcctcagcctcctggctggctgagggcctccctcctaaggtttctgtcaggaccaggaggaataagcatgcaatgaatgcagtgaggtgtctggcactggatgaatggtagatgttgtcatcatcatcattattattattactaataaaaggtaacccacagccagcctctctgtagccaacaattagatgcttatctggtgtgtggaatgcagggggggagggccctcccaccaataaaattggggccactccctgacctcggtttctcgccaggatcaaccaccccaagagcgaggaccgggtggaggatgtgccagctttctgagccacacctgctgacacttttcgccctcagtcaaagcctatctgagatcttcagccaattctgtgcatttcatttttttttcttttataaaaagtggtttatctatttccctttttattttagagacaggtcttactatgttgcccgggttggtcttgaactcctgggctcaaacgatcctgctgccttggcttcccaaaatgctgggattacaggtgtgagccacaattttgtacatttcagagaggtatgtattcaagtgagaatcagccaccgctgggttacattaagtgtctggtttagcaagtcagggatataaaacagcatcagaaggtggccacagtgagcaggaaccacaacacacaaacacacacacacactagtctcacgggtggctcagccccaggtcaacatccattcaagctatggcttgacaatttgacaagctactttttactccatttatagcttaggtgaagaggttgaatattaaatgcattattatcatcactggttcaaacagattcctttcttcattttcttttcttttcttttcttttttcttttttttttttttttaagatggagttttgctcttcgtgcccatgctggagtacaatggtgcgatcttggctcaccgcaacctctgcctcatggattcaagcgattctcctacctcagcctcccaagtagctgagattacaggcatgcgccaccatgcctggctaattttttgtatttttagtagaggtggggtttctccatattgatcaggctggtctcgaactcctgacctcaggtgatctgcccacctcagcctcccaaagtgctggaattacaggcatgagccaccatgcccggcccctttcttcattttctctctctctttctgtgccttcttttcctccctcccactctccctcagtcctacaaaatgtgcagtgtggttcttatgtatgagtgaatgtgtgactttaatttacttaactggcattaggtgatattcttactctatcctaagccactttgcaaatagcactatgtttttaaggcccacccgtgttgttacgtgttcatacatgtgttcgttgcatctgacttctgcataggaacttcatggcgggacgtccaccacatttacacaattcccctactgatgggcacttggtggcttccagtttctggccactgcaaagaacactgcaaagcacaagcttgtacgtgtccccttgtgggtgtgtaagaatttctttgggatgtgtagccaggagagaaatcgctgagtcattgggtgtgtgtatacttgtttgatgaaatagcatcagctccgtcttcataattggagacaccacactcaacccagttgcacttgaacattcgaatgtctacacatccctgacagcccttgaccttgtctgcccttctcaaaatgagaagactacttgatgtaaagtcacatctcaagttacagtatctaaaaagtttgaacatctctctctctttttagagaccaggtgtcagtctgcgatcacagctcatggcagcctcccaggctcaagtgatcctcccacctcagcctcaagagtagctgggaccacaggctgacaccaccatgcctggctaattttattttattttttattttttatttttttttgagacggagtctcgctctgttgcccaggctggattgcagtggcgtgatctcggctcactgcaagctccgcctcccgtgttcacgccattctcctgcctcagcctcccgagtagctgggactacaggcgcccgccaccacgcctgcatgcctggctcatttttaatatttttttatagaggccgtgtttcgccatgttgcccagggtgttcttgaactcctgagctcaagtgatccgcctgcctcggcctcccgaagtgccgggattacaggcacgagccaccgcgcctggccttgaacatctctatgtgcatgttagcttttggaattctgcttctgcaaatcacctctttgtagcttttatccatttacctataaggatatccatattttttctcattaattcacaggtgcttcttgcatattacaggttctagttctttgtccattttggatgttacaaataacttctcccattctgataaatgcctatgaatcgtccttaccttctcttaaaccaaagtgtttaattttaaaataatcaaactaatcaatgttttgtcatatgatgtgtgttttttttaggtcttaagaagtcatcccctatcacagagattcaaaaataggccgggtgttgtggctcatgcctgtattcccagcacagggatgccaaggcaggaggatcacttaaggtcagtagtttgagaccagcctggccaacatggcaaaacccccatctctacccaaaaatagaaaaagcagctggacgtagtggcatgtgcctgtagttacagctacttgggaggctgaggcatgagaatcgcttgagccggggaggcagaggttgtagtgagcccagatcatgccactgcactccagcttggacgatagagtcttcaaaaaaataaaaaaataaataaaataaatatatattcaccatgattttttctattaattttataatattatctttcagtggtctttaatacagctggaatccaatttcatgtgtagtattagaaatctaggtttctttttctctgcacagcagacgagtttttctaatgccacttactaaatataccatcattctcccactaatttgtgttgatattttatcttatattaagtccctaatatattatatgatgatacatcagtttcctatgattctctttctgggacctctctcctgcctctctggtctacttgtctgttcttgcactgatcccacccttttttaaaaacactgattttgttttgtagcatgtcttaatatcgagtagggcgaggagcttatttcttgcaccgccacagccgcatttttctcaccacttacatcaccatgcaggaaatacactgatctcctccacccttaatgggaacaatttacagacatctgtcccctcctggttctggatccagcctccatgttaaaaagacatcttcatccaggaaaagaaagtcaaggctgcccaggaaaatctgcacaatgtcttagctcatctttcagtttccagaagcttcatttcccataccatcctctctatatcggcatatagaaaaccaactacggtagcccggacacccaagattgtattctgcctgttccaagcccagatgtaggaagtccatgcatggagctccgaaggaaatcatcagaaatgtgagctgctttctgtaatcccatctttatcctgcggcttttattctcatcatgcaaggtggctggtccgtctccaggcacccatattccaggtgagaagaggtggaagggaaggtccaaaggtccaaacattactctctctctcctatttatttatttatttatattttttatttttttaagacagagtcctgctctgtcgcccaggctggaatgcagtggtgcgatctcggctcactgcaacttccaccttccgggttcaagcaattctcctgcctcagcctcctgagtagctgggattacaggtgcccaccactgtgcccagctaatttttgtgtttttagtagagatggggtttcatcatgttggccaggctggtctcgaactcctgaccccgtgatccacctgcctcggcctcccaaagtgctgggattataggtgtgagccaccacacccagcctactctttctcttttatcagcaaaacaaaaactttcccagaaactccagctttgtcttcttgcttataactggatgacatggccacccggatgtatccaggtcatatgccaatctgagcaatactcgggctcgtcagtaatgcagtgggaagaatgataagcacatctcagttgcacccagcttgccctgtgccaagtcagacaagtcacaaaacaccaacctctgcctcttagtccacacacatctcccctctgttcgcctgtttgcccttgagcctgaacttgatgggaaaatgcatccaggctctgccattagcaacaatcagcgtggggatagtgcttgcatctttggtgggcagagaaccaagcacactgtttctcctaaactcttggtttatttttcttgagacagggtctggctttgttgcccaggctggtctcgaactcctgggctcaagcaatcctcctgcctcagcctctgaagtagttgggattacaggtgtgagccaccatgcccggcctctcttcttttcatcacggttgtagcaattgttccacaagtgtattacctttacaactgttaaagaaactagaaactatccaaatgtctcctcatagtaaaaaaatggctcaataaatcggagtacatttacacaatggtatactgtgcaacgatgagaataaaacatttacaaccataaacaaaaacctgggcggaccacacaatatataatactgagaaaaaaaaaagcccaacacaaaataatataagacactcattgctttttttgtttgtttgtttttttgtttttttagacaaagtctcactctgtcaccaggctggagagcagtggcacgatctcagctcactgcaacctctgcctcccaggttcaagcaattctcctgcctcagcctcccaagtagctgggattacaggtgcatgcctccatgtccggctaatttttgtatttttagtagagacggggtttcaccatgctggccaggatggtctcgatctcttgacctcgtgatccactcggctcagcctcccaaatgatttatttatataaacttattatacttctatatgtctatgtaaataaatttatatttatatgttgttcataaatgggacaaattaatttatggtgatagaagtcacaaaagttgctacacttggggagaagtcatgaaagtcgctacccttgcaggcgagggatttaggtagtaatggaagcggctacatttggcaggggaggtagtgactgcaaggaagaccccactggtttttctgaggagatgcttaggttccgtggctctgtctgaatgctggttacaagggtgtgttctgttttgtgaaacttcactgccatttatgatacttctgtgcatgtttctttctttctcctttctttctttctttctttctttctttctttctttctttctttctttctttctttctttttttgtttcttgagacagtctcattctgtcatctaggctggagtgcaatggcgtgatcttggctcactgcaatctccacctcccaggttcaagcgattctcttgcctcagcctcccgagtagctgggattacaggtgcccaccaccgagcccggctaatttttgtatttttagtagagacagggtttcgccacattggccatgctggtttcgaactcctgacctcaggtaatccacccgcctcggcctcccaaagtgctgggattacaggtgtgagccaccatgcccggccctgtgcattatctttcaataaaagttaatttaaaatattgctgcaagggcatctatggggcagacatcattggttgttcctcccgttctttgatgtcggaatcctgatttctctcaaggagcagcttctacatgctttaggggaggtcctccactccatcgtgaaagaataatcctgtttggttcaaatcaaccatgttaacctctccaccccactccccaccccaccccaccagtctgtgactggtttaggaaaggacatgtgacccaattctggccagtaagaataagataaaattctgctggggtggtttctggaaaagcatcatccttctcaaagacagacccactacgggtgttgatcttaaggatgatgaccccccgccgaggagaaccaagcgaaacacagcctgacgccctgtgtctggagctgcccttacctggatttcttgatatgtgaaattaaaacttatttactattgaagccagcatgaatcttctcttgttcctcaaagcagcttaaccggaaacatcattttggaaaatgtgctcaagactgccccttagctaggattctgctcctatctagatttttttaagattaagaaaaaaaaaattgaggccagatggctcacgcctgtaatcccagcactttgggaggctgaggtaggcagatcacctgaggtcaggagttcgagaccagtgtggccaacatagcgaaaccctgtctctactaaaaatacaaaaattagccaggcatggtggctcacacctatagtcccagctactcaggaggctgaggcatggggattgcttgaactggggaggtggaagttgcagtgagccgagaatacgctactgcactccagcctgggtgacagagtgagactctgtctaaagaaaaacaaaaacaaaaaacaaacattgaattacaactgtcacccagtactatttgcccctattttcacaccacaccacacaccctggcagcccagtctttctggaatgtcccctaaaaagtcgtgaggacttgtaaatggctaggcacaaaggggaagataaaggtgacaattattggatcattttgatgtatgtgtccttctctcacacctttgactgttcatcaggcagacacttcttatctcttcttccttgctggtaaggactgcacccgtgacagagaaatgtcagaaactcactttctcagcttctcttgaagctagagtgtcagcattgggaccttctccaatgagtggtcattgagacccaagaacagatccaggggtgtggggggactctggaaaagactttctttcctaatgaagagagctctgccaacagagtctctccttcctgccttttgtcatggtgcgtgaggatgtgatgtctggagctgtggcagccattttacagccacgagattacaagcctaaaggagaaagctgacatattttcttcttcctgctagaacataagcttaaggaaggcaggggtttggtgtctgttttattaatcagtctatcccaagtgtctataatattacttggctctcataggtgctcatgagttgaataaatatatgaatgaatgaatgcagagggcagtagagaagaaagatgggtccctaatgatgtaatgtaggaatcaccaaaccacagtacttccctcttttggggcttcttattatgtgaaataatacacgtccttattgcttaacccactttgagttgggtattttgttactgacaaaattttctagtgtaattccttttctagagtgttcaatttccaaagtattccctggagtgactttctataaccacctgtgagtatcttgagaaatcttagagctggattggcacgtggagatcattacgtttcaatcctcccattttacaggtagagaaactgaggtccagaaaaagtacaaatgacctttacacaggtcactcagaaagtgctgaagactagaatgtccatgtgttgatgtgttgtccatttcaatgactaccacgcccacaaccttcttaggggccctgccctgcccactgctatggatgaaggggtggctgggggatccatgttgcactctgtgggcccacctttcagactagagatagagtctgcatctgaccctaggacagccaaccagattttttctctaggggctatgaacaaagaaaacccagtaactggagccagttatgggggagagaagagatgctttgataggcaacaggcagtcaatgtaatgagaaaacagaggtgggatgagaagaaagagaccgtgaaagacacatacctaggggagaagggatagagatcccacaggcagctgcttctgccctgacattttccaatttaaattaatggatattcttttgataactgatatggcctggccctgtgtccccacccaaatctcatcttggattttaatttgaatcataatccccacgtgttgggggtgggatctcatgggaggtgattagatcatggggacagtccccccatgctattcttgtgatagtagtgagttctcacaagatctgatggttttataattttcccccttcagtttgcccttctcctttcggccaccctgtgaagaaggacatgtttggttccccttctaccatgatcgtaagttttctgaggcctccccagccatgctgaactatgagtcaatcaaacctctttcctttataaattacccagtcttaggtagtatctttgcagcaacttgagaatggactaatacaataacctacctcccgtttctaccctggccaacaagcagctccagtttgttctccacaaagagccagaatgttctcctttgtgcatgaaccagatccggctggaaaacctccaatgacttcccaaattctcagagaaaacaaacaagtgtccagctctatgggtcttctttcagctcctggagaatgtccagcatgctccaatctcagcacttggcacttgacctcctctctgtctggaacatcagtgccccagatgttcatggggctggccactttctttctttttttttttttttttgagatggagtctccttccatcacccaggctgaagtgcagtggcgcaatctcggctcactgcaacttctgcctcccaggttccagtgattctcctgcctcagcctcccaagtagctgggattacaggtgtgcaacaccacgcccagctagtttttgtatttttagtagagacagggtttcaccatgttggccaggctggtcttgaactcctgacctcaagtaaccacctacctcagcctcccaaagtgctggggttataggcatgagccactgcgccctgcctggggctggccactctatcctctcagtctcaaatggtacctcctcggcgaggccctttgtgtttgttacagtggctactgtaacaaatcactgagagtctagttgcttaaaacaacacagatttattctattgtagtttgggaggtcagaagtcctaaagatctcactgggcagaaatcaaggtggtcggcagggctggttccttctggaggctctaggggagggtccattcccatgtcctcctgccttccagaggttgcccatattccttggctcatgccccttccttcaccttcatcatcatcatcattattattattattattattattattattactattgttagagattgggtcttgttctgttgctcaggctggagtgcagtgatcctcctacttcagtctcccgagtagctgggactgtaggcacacaccactacacctggcaaattaaaaaacattttttttttttttagagatggggtctccctatgttgcccaggctggtcttgaactcttggcctcaagccatgcccctgccttggcctcccaaagtgctgggattacaggcgtgagccaccatgctcatcttcctctgtcttcaaagccagcagcatagcatcttccagtctctcattctgatctttccgcctccctcttataaggacccttctgattatattgggtccacccagataatccaggatcatctccccatctcaagacccttaatcacatcagcaaagcccccttgctatagaaggtaacatattcacaggctccagaaattaagatggcgtttcgaggtgggagggaggcattatgctgcctcccatgccctccttgatcatccaatgtagagaccccccccaccaactcacgacatttcctctcttgccttatgccctgctctcattgtgttcatgtcacttacataattactatggcacatacaagtttatctctctctctcttttgtttttttgagctggcatcttactgtcgccaggctggagtgcagtggcgtgatctctgctcactgtaatctccacctcccaggttcaagcaattctcctgcctcagtctcctgagtagctgggattacaggtgcatgccaccatgcctagctaatttttgtatttttagtagagagggggtttcaccatgttggccaggatggtctcgatctcctgaacttgtgattcgcctgctttggcctcccaattatctctctctttattgtctgtcttccactcctggaatgtgagctctacaaggcaggaactttttggtctgtttggcccaatgccttatccccagcacatggaaccattcctggtgcaaagtagccacatgggcccgggtgtggtggctcatgcctgtaatcccagcactttgggaggctgaggcgggcagatcacttgaggtcaggagttcgagaccagcctggccaacatggtgaaaccctgtttctactaaaaatacaaaaactagctgggcgtggtggtggacgcctgtaatcccagatgcttgggaggctgaggcaggagaatcgcttgaacctgggaggtggaggttgcagtgagccgagattgtgccactgcactccagtgtggttaacagagtgagactccatcgcaaaaaaaaaaaaataataataataaataaatgaaaataaaaaatagccacctggccaatatttatgaagaaggtgaaaagtagtctgactggacctctgtttctcacaacccaagtgacctcatagacaaaacacatgagcctggaggcggagatatgacttgttcacagccaccctgcacagggaggagacacaggaagattccacttctcagtttatttctgggactaaatttgggtcagagctgcagagaagggatgggccctgagcttgaggatgaaagtgccccagggagattgagacgcaacccccgccctggacagttttggaaattgttcccagggttcaactagagagacacggtcagcccaatgtgggggaagcagaccctgagtccaggagacatggggtcaggggctggagagatgaacattctcaacatctctgggaaggaatgagggtctgaaaggagtgtcagggctgtccctgcagcaggtggggatgccggtgtgctgagtcctgggatgactcaggagttggcctggatggtttcctggatccacttggtgaacttgcagaggttcgtgtagacacccggtctgttgggccgggcacaagggtaatctccccaggacacgagtccctgcagggagccattgcagaccacaggccccccagaatcaccctgcaggagagaaaggggggcatgagagaggcagagatgtggcaaagtgggcagaaggagacatgagagacccagagatgcccatagatggagaagcagatgggaacagacacacagagatggaaagtacagagatgaagaaatgcagaaaaagacagagatggagacacaggcaaaaggagagagagggagaatgttattaatatttcactccaaatccagcttttttttttttgagatggagtcttactctgttgcccaggttggagcgcagtggcctgacctcagctcactgcagcctccatctcccgggttcaagcaattctcctgcctcagcctcccaagtagctgtgactacaggtgtccatcaccacacccggctaattttttgtattttttttgtagagacggggtttcaccatgttggccaggctggtctcgaactcctggcctcaagtgattcgcccacctcagcctccaaagtgttgggattacaggcgtgagccaccatgcctggcctccaagttcaacctttagaccccatttgtcactctccactccatcttcctcttccagattcctgttgtccacacatcatttcgggggggtctgtgacccttcctctccacatctcgaatcttcgtctctactttctgttccagcctgtctccctcatcgtgtatctctccgcctccctttctctctcactctcccctccagcctgtgcaggccttatttctcttactggacacacaccttccttccccattctccaccaacccatccttatacctcccttctgcaaaaatacggttctcagcccctggatgagggttcctcgatctgggcactgtgggcatctgaagctggataatggtttgttgtggaggcctgccgtgtgcatcatagcatgttgaacagcacacttggcatctatccattagttgccagtaatgcccctccatatagttgtgacaaccaaaaatgtctcctggtattgccagtgtcttctaggggcagaatcactcccaatagaaatccattcgcttggactaatttgtgtttcctgtcttcaattccccatacctccctataattaccctcctataataatactcactgctcttcaacagtcatttttttccctcttttccttctttccttccttcctctctcttttctttcttctttctttctttctttttctttctttctctttcttcctttctttctccttccttccttcctttctttctccttccttcctttctttctccttccttccttcctttctctctccttcctcccttcgtctcttttttttttctttctgacaaaaacgtcttgctttgtcacccaggctgctgtctggagtgcagcagtgcagtcatggcttaccgcagcctcaaacgtttgggctcaagcaattctcccacctcagcctcccaagtagctggaactacaggtgcaagccaccacacccggctaattttttttttttttaatttactacatatttatctatctctttattgcctgtcttccacttggggaacatgaggtccacgcggcaggaagtttttggtctgttttgcctgatgccatatccacagcacctggaaccattcctggtgcaaaatagccactcggctaatatttatgaagaaaatgaaaagtagcttgagtggacctctgtttgaggtagagagaaatgtctatctcccacctgggcacggtggctcacacctgtaataccagcaatttgggaggccgaggcaggcagatcactggaggtcaggagttcaagaccagcctggccaacatggtggaaccccatctctacggaaaaaaaaaaatagccaggcatggtggtgggtgcctgttatcccagctacttgggaggctgaggtggaagaaatgcttgaacccaggaggcgcatgctgcagtgagctgatatggtgccattgcactccagcctgggtgacagagcgagactccgtctcaaaaaagaaaagaaaagaaaagaaaagaaataaatatgtacatactacaataatgatgtaagtggtatgaataaaatctactaaaataaaaacaattagtatttttatttttttaatttttagttgcccaggctggtcttgaactcctgagctcaagtgatcttcccacttcagtctcccagagtgctgggattactggcatgtgccattgcacccggcttcatttcttacttacatgcatgcaaaatatgaattacagagtcctggtatcaattattaggaaagccaagacttgcctttttcccagtagcagacactgtttcaaagcaaacaagcttagctgcctgtacctctaaatttcaactttcttgtggtttaatttctctcattattttttaaatttaatatctctgcagagtttcttttgagaggctgttagttaactgctctgagccttggctccttgtttgtaaaatagggccaataataacaggtaaatgagttaatgagctgaggcatgcaaaccacttaaaacagtgtccagcaattagccagatgctattatttttatactattggtattagtattgttgtagttgttattatttcttgcttgtagcttttagtggccacacccagaccacacaccggtatgaaaaaacaaacaaaaaaacaccttgaggtctggaaaaacaagatactaaccttgcctacagaaaggctaaatagttttaaatgccaccacttgaatgagatgtgatttcttttcttttctttttttttttttgagacggagtctcactgtgttgcccaggctggagtgcagtggtgcaacctcggctcactgcaagttccgcctcccgggttcaggccattctcctgcctcagcctcccgagtagctgggactacaggcgcctgccaccacgcccggctaattttttgtgtttttagtagagacagggtttcaccgtgtcagccaggatggtctccatctcctgacctagtgatccacccgcctcggcctcccaaagtgttgggattacaggtgtgagccaccacgcccggccgagatgtgctttcttctgttaaaagttttccccctcgcaacccacccccccacacccagggcacagagaagaaatggggagagctggggaggtgttgcatttgtcaggtttgtacaatttggggggagcttttcatagccatgggactggagtactcctgaatccccagcttcctaactactgttgaaacacacaccctgctaatgagagcttgttaacttacgtccttctagatcccttgggagcctgaatacagagaagggtgctggttgatgtaacagtttgattttaaattctgtcttcctcaacagatacagcttccattagaacatagggaagctctgtgttggtgaccaagaaatacttgcagagcattcgcccctgcctacacctccagcgtcactttctactgttgcccccacttttgttctccagttgcattggtttcctcttcttctttgaatcagccaaattccttactgcctcagggcctttgcacgtgccttttctttccccttaaacttcacgagtttagcttctttgtgtcatccattctctgctcaaatgccacctctccaaggaggctcccctgaccacctttttgaatattggcccttattgtttactatcctaaaaccatgttttattttggggttaacctttaccactctctgaaattgccctatttatgcagattcttgaccacagagttttttattttttaactttgttcctccagcccttccagcagctttgcaattaatcccctgtattaaatattctcttgtaaaaatacctaccagatttctcttttccttcctcaagatattttaccagcacttgctagaaaactgtcatattacagattttgttgaaacaagacacttaactaccacacgcctgaaaactgccaaaactgacatctgtaacacggagtgcccctattagatatggtatctttatgcagtgcacaacctgcccaaccatacaaaacagccctgatctttccctctagatccgtgccatccaatacagtaactgctagccacatgtggctactgagcacctgaaatgtagctagtccaaattgagatgtgctgtcagcataacatatatactcactttcaaagacttaatatgaaaacaagaaaagaatgtaaagtatctcattcataattgttttatattaattacactttgaaatgattgtatttgggatacattgggttattaaagttaacttcacctgtttcttttttacttgtttttttttttctttttgagacaaaagtgtcactctgtctcccaggttggagtgagtggcacgatctcagctcactgcaacctccacctcctgggtttaagtgattcttgtgtctcggcctcctgagcagctgagattacaggcgcccgccaccatgccaggctaatttttgtatttttttttagagacagagtttcgccatgttggccaggctagtctcaaactcctgaccaaaggtgatctgcctgcctcagcctcccaaagtgctgggattacaggtgtgagccactgcgcccagccttttttacctgttttaatgtggctactaaaaaactggaaatgacataagcagctcagcattatttctactaaacaccactactctagggtatgagctctgtgagaacaggggtcctgactgtcttggcaattgctggattctcagaatttggcaacgctccatgttaccgagttggcactcagtgtgtatctgctgaataaagagaggtgtcctcacctggcaggagtctctacctgctttgtcaccggcgcagaacatggtgtcatctatctgtctcgggtaagcatcctcgcaccttttctgacttagcacgctgatattcaagcactggaggaccttagggaagtgcactgtcaaacaggaacacaatgagaagtggagaaagatggaaggcggcagagatgggtcggtatcaagaagaacctggacactcaccttgggggctcttggttgtcccccagccagacaccaagcactttgtcccagcagagggacaatgagaggagacgttgatgggtctgacatctttagtgggacgaattcttctgttcagtttgatgagcatgaggtcgttagagtggccagggtgggagtagccagggtgggggatggatttgaccccctggaacatctgctgcccagattcataaactggtgacagggagtagtggccgagacggactctgaaaactctgaggaagatggggcaggtcaccaccaaccctgatctctatctccacgtccaacgccaatcccaaccccacacccagccccagccccacccccatccccacccccggtccccaaaccatcctcaactccctcttggtctccaatcccatgcctgtccccatcccagtcacaattccaaacccatcccattcccaaccctaattctttccctacccagaagccatcaccatatgcattctcaagcccaaatccaaccatctccaaccccacccaaaactccaatccccatccttcattctatatctgctcccaatctcaaccctatctccatgctatcttcatttccaccccagcccgattttcacccacccccaattctaaagccaatcccaattccacctccatcccaaaccattcaacaaatatatgctcctaaccccaaatccaacccatccttggctccttcccattccctaccacaacactctcccctctccaacctcatcctcccaccttgctcccccgcaaaactccatccttagtcctatccccaactcgacctcctcctgctcccacatccccaacccatccccaccaaccctcaccttccatgacacccccaaccccacttccccgtccccaccagccctcacctccatgacacccccacccccacttccccacccccacccccacttccccgtccccaccaaccctcctcttggaactcccactcacttcttcctgcagtgggcggccgtgagcagccactgtggatgcaccaacaccgccccgcagtagagctggttgggccttagcaacagcgcggcctgccacggctgggtgtgcatatcgcagtcggatccattgatgatgcggctgctgctgtcatccgaccgggcgtcttccccggccccagctcccaggtcctggttgctcccagagggcacggtgttagaggggtggtcacaggaaacatcattgttggcgagaacatgctctgggaacggaaaatgggttgggcggggctcagaggcggggcttgggctgggggtgggtttcagactcaagaggccagaccagctagagggtgggtgtctgacatgctgagggggcaggggcagggcctggagaataagagtggcacctctcaagcccaggctcaagctcaaggacagagcccaggctcaggtagggttactggactctaactggacctcacagattcctggaattggctagaactacatgtgagggtaaaattgggtacaggattcctggacaagctcaggggtagtgccaaagctgtgggggctggagcctggggatgggagggagaccagggctttagggatggaactggtctcaagaagtggggtcaggcctcagtgagtggggtcagggctggaggcaggaaggggtttggaattgacttagttagggccagggtcagggttacatgttagagtctcctataaagagctctgactttgggctgggggcggtggctcacgcctgtaaccccagcactctgggaggccgaggtgggcggatcacctgaggttgggagtttgagaccagcctggccaacaaggtgaaaccctgtctctactaaagacacaaaaattagccaggcgtggtggcgcgcacctgtaatcccagctactcaggaggtggaggcacgagaatcacttgaacctgggaggcagaggttgcagtgagccgagatcacgccactgcactccagcctgggagagagagcaagactgtctccaaaaaaaaaaaaaaaaaagctctgactttgaagggggttctagaaggtacccacagaatagggggtggagcctggcccaaaggggtgtggccttaggcggggtccactagagtctggcctaggggcgtggttgaggaaaggaggtggggtcagagctcatgggcggagctagggttccgaaagcaggaccaggaaagaagggctcagcttagggggccacatggaggggaagagcaggcctaggtttctgaattctcagatgaaaacatgccttctcaatcctgtcaatctcctcctctcacacacagacctacagactacatgcatgccccactccatcatcagtcctcccgtgcccattcactggttcttacccttttttttttctttttttctttcgagacggagtttcgctcttgttgcccaggctggagtgcaatggcgcgatctcggctcaccgcaacctccacctcccgggttcaagcgatttttctgccccagtctcccgagtagctgggattacaggcacgcgccaccacaccagctaattttttgtatttttagtagagacggggttctccatgttggtcaggctggcctcgatctcccgacctcaggtgatccgcctgcctcggcctcccaaagggctgggattacaggcgtgagccaccgcgcccggcctggttcttacccttgctgatggccctggcaccaccatcattcacgaactcaccccaagaaccacgcgcacaacagcagtaacagccaagcacgcacgcagttctgcagacacgcccatgttgcctccacaggtgcagctaacatacagctctgtctccaggtacacacgctcccgggcagcctagcgggatcgcacaccctcatccacagtgtctcagtgccacgcacagatgccgtgtgtgcacagatgttcagactgccacatactcttctgcacacaggcacacactgcaagtcagtcacctggcacccatctcccagagatagctacccctgcaccctctatccctccaggcagagacagaaactccagacacacagctgcaccatcacacatacagtagcatttacacggcctcacacagacacacacagtcacatacagtcacccctacacagagcttcaggtagtcacacggtcacaaatacgggcatccataacgtcacactcagccacaatcacataatcgcctgcaagcagcacacagtcacagctttccatggtgatgaccacttttgttgcacgcaatcccgggacctcagggacaggaactgcagatacctgcagtcatatacaatgccaagtcaccacacacagccaaacacacagtgaacacccccagtgctacatgcattcacccacacagctgtggagccacacacaatcttaaatgcacacacaatcacaaaaccacacacacagcctcaaagggtcagtgccacctgccgcacagtcacctgatatgggaaaaggcatccccctccccgacacacaccgtggcagtcacagggccacatacgatcgcacaaccacaagtacagacagagactcacattcacccggtcccggagtcatgcccaggctcacacagttccccaggggacaggcgctctagtgccgcagagacagtcctcccaatcccacaaccctcccaccccagagttctggttacctgtgacccccagaagcaaggctgtgatcagagcacagagcacccacatccaggggggtcttgctgtagccatggccgctgcacctggatggggaatgtcagagggttgggaggcccaggcgatccggggagcccttaacccacttcccctccctcccctaccttatttccccaggtagagaggaaccacaaggacgggccaccatcggcactgcgctgagacccaggcactatagaattcagaagataggagtctagcagcctccagacagggcaaggaggggacagagaaagatgtgggtgcaggacgcacagacacctctccttccctgcctgctgagccaccctcaccaggtctcacttgccctgtcccccaggtagggggtgggggatttgctcccagctcagccgcagacttctcaggcctgtgccttcctggccactgcctcctcctgggctctgggcaccgggcctgagttataaccacccactgctccctggggcacattcccgggcaatgaggtgcctatcgggccttagcaatagctcctcctgctccccctatctccacccccagagcaccccccacccagtccggaatgtcactccctacctccctggcccggagaatggggaggggtctccggaagccaggccagccccttccctgcctcccccagccttaaggatctggcttctcaccaactctgggtcactattcttggcgcctggattgcttgctttcttctctgcattttgctcattccaccactgtctgttcaccctcgatactcctctttccatctttgtctctggttttttctcagagtcttcttccatctctctgtggttctccctcggctatctttctgagtctctctcaatatctcgtgtctctctccacccctctctctctttctatccctctcgcctctctgtctctctgtctctgtctctctctctctgtctttttctctgtctgtctctcactcactctctctctctctcctcctgtctgtcttaggagccttgttttgttctccttgggccacaggtgtttctgtctccctgttcctccctgtctttctatgcctctgtgattctttcttttttaaaggttctgaatgatttgtcaaatataccttagagttcttggcccatttattttcctttatttcacttctgctctatttgttgacagcattttttttttagatataactaaggtacaacaaactgcttgttcgtttgtttatttatttatttgagacagagtcttgctctgtcgcccaggctggagggcggtgatgtgatctcggcccactgcaacctccgcctccagggttcaagtgactctcgtgcctcagcctccagcatagctgggattacaggtgtgccccacgacacccggctgatttttttttttttttttttttttttagtaaagacagagtttcaccatgttggccaggctggtctcaaactcctggcctcaagtgattcacccacctctgcctcccaaagtgctggaattacaggcatgagccacggtgcctggcccaaactgcatatttaaagggtagagtctgatggctttaggtacttgtcacatcagcatagtcaagaagatgatcatggccgggcgcggtggctcacgcctgtaatcccagcactttgggaggccgaggcgggcggatcacgaggtcaggagatcgaggccatcccggctaaaacggtgaaaccccgtctctactaaaaatacaaaaaaattagccgggcgtagtggcgggcgcctgtagtcccagctacttgggaggctgaggcaggagaatggcgtgaacccgggaggcggagcttgcagtgagccgagatcccgccactgcactccagcctgggcgacagagcgagactccgtctcaaaaaaaaaaaaaaaaaaaaaaaaaaaagaagatgatcatagacaccaccctgaaaactgtgcttctgcccctttgcgtgtatctgggactctgttaatctctctttctttacacctctgtgtctccatttgtgtctttctctatcttctcttttctctctgactctgtgtgtccctgtgtcccaggctctctgtgtgttctctctgtgtttctgtagttgtgttattctgtctctctctctctctctctttcttccccaccccttcctccttccctgtctttctgcctccctctccctgcattttaggcaggggagactcaagccactttgcagagggagctctcaactccttctcttgccttcactctgggcccaggccgtggagcacaaagaggcagggacccagtctgggaatctgcaggtgccgtggcccggctggtgtggccaggcatgggtgagagagttgggcagggctacttgttattgggaaaatagatcaagaggccaggagaggggcagacggcttgggaaatgggcattgggtggggaacccgaaaggtggcttctccctctccactcctgagccatctgaggccacctctcctgacctcgtctctacgccagcttttctttccatctgccgccagctctttgcatctgtcttcgtgtctccttgtctctgtcctcactaggaagcaagagctaatgaaacattcatctgtgatgtgccagacacaggtgtctgtgaacaatcagactcaggtgtccgtgaacaaaatgacaaagacgcctgaagatgctgccttctttgagccctcattccttgagggcaaaaaaacaaccgagctgtgttgctcacatctataattctgttaaaggggagattttagagcactcaggactggttttagtgcacagggaaaataccaaaaaacccaaaataacaaaaacctattctgaggtttattttgattatgacaattaatatttcattcattaaagtgacaaaaccgtggccgggcgcagtgtctcacccctgtaatcccagcactttgggaggccaaggcaggtggatcacaaggtcaggagttcgacaccagcctggccaacatggtgaaaccctgtctctactaaaaatacaaaaattagccaggcgtggtggcgggtgcctgtaatcccagctactcaggaggctgaggcaggagaatcgcttgaacttgggaggtggaggttgcattgagctgagatcacgccactgcagtccagcctgggtgacaagagcgaaactccatctcaaaataaataaattaattaattaataaagtgacaaaaccagcaacctatttcttccttagtcttttaagttgtttgcaacccattttggtctagataaatcttttttttctttctttcttttagacatcagttgcttttaagttttttttttttttttttttttttttttttgagatggagtctcactctgtctcccaggctgggtgcagtggtgcgatcttggctcaccgcaacctccgcctcctgggttcaaacgattctcctgtctcagcctccttcctgtgtagctgggactacaggaggcacaccggctaattatttttttgtatttttagtagagacggggtttcaccgtgttagccaggatggtctccatctcctgacctcgtgatccgcccgcctcagcctcccaaagtgctaggattacaggtgtgagccaccgcacccggcctatggggtcctcataataatgcttggtcctattcacaaactaagttaattaaacaccttcagacattttaaactacatttctaaaaccaacatattcaatctcttctggaagtcccttgatttttaggcaccacttccaaagcattgaagtgagtttgtacatctgagtgtattacactcataaatatgacccatgttgcattctttcagatatcccaatgctggatattaacttggcgtaactccatcttaaaaaaatcacagctcaattattacacatttaaagctgaagtcacaaggctttccctataacaggtgaaattctcttagacacacaagcacctaaaataccaaaagtgtagagattctgcttcaaaaaaataaaattcataagaagggttggatgtctaaacattttaatgctcagttccaaaacatctcagaattacaagaagacttcagcacagaagagtggttaggagcccaaactgtggaaccagcccctagcatttaaattctggtgtagccatctactagctgtgaggctttgatcacaccatggaccccctctgtgccttggtttccctgtctgtaaaatgggaacaataatggtatccacctcacaggcttgtgatgaggatcaaatgagttaatatatgtaaggcacttagaatagtacctggtaagtgctaatcagtatattttaaattattattattactgttgtcatgactatcattattcttattatccattcagaaagtcaatttctttctgaatggctcacgcctgctatcccaacattttgggattctgagattcatggatcacttgaggtcggaagtttgagaccagcctggtcaacacggtgaaaccctgtctgtactaaaaaaaaaaaaaaaaaaaaaaaaaaaaaaaaaaaaaaaaaaaattaactgggtgtgctggcacacagctgtaatcccagctacttcagaggctgaggcaggagaactgcttgagcccgggaggcagaggttgcagtgagccgagatcgtgccattgcactccaccctgggtgacagagtgagactctgagactctgtctcaaaaagaaaaaaagaaagtcaattttctctcaattaactgcagctgattttggtctggaccgtcattggctgggttcctcttggtgaccctggtgaatttcacggcttttccggagaaggttgctcaaggggggcccaggtcattcacatgacttcataattccatcaagtcacaaagtcagccacttccttccatcacgtccccatgatagaatgttgcatttctctgattcttaaggcaaagatcatagggtctttctaaagcccagatccgaccacgtccttccttttctccaggccctcgggatcaggtccaagttcttctgcctggcgctcagtggcatcatcttccgctgacctacatttccagccatatcattcatttctcccacctcaaacgccagcctccaccatccaggacgattcacaggtgtcctcacacccccaggattgtctacatgttgttccttctgtgagaatgccacccacccgaacttctccaaagggtgacctcatatccagccttcctttccacccctcctgggcccagccccacctcaactctcatcttctctccctgcatcatcacctcaacctcctccccagccccagcctccagggtctcccctctggttcatcctgcacatggccctagggctgccccagctcacagactttccatggctccccagtgccctcaggagaaggtttcagcctctcatgctggcatctgagatccttggggatctgatccctgccctcctctcccatcaccgttacccatgcatggtggtcttcctaccctcccaccttcctggtttggctgtgacaaaagtttaggctgggcgcggtggctcacacctgtaatcccagcactttgggaggccgaggtgggtggatcatgaggtcaggagttcgagaccagcctggccaacatgttgacaccccgtctctactaaaaatacaaaaactagccgggcatggtggcacgtacctgtaatcccagctactcaggaggctgagggaggagaatcgcttgaacccgggaggcgaaggttgcagtgagccgagatggcgccactgcactccagcttgggtgacagagcaagactccatcttggggagggaaaaaaaaatttaggggcaaaagccatctttgaggtatagcacaaggtggaggcatcaagagtgccttcctggaggggaggaaaaatcaaattggctgtaaaggagaactgagaatatctagatttcagaaaggtggacgtcaaatcaaagcaaaaagccccactcataataaaattcattctttattgagtgcatggtggcccaggtgctattccatgtatgtcataggtgtgaaaccttaaatctttccaacagccactgccttatggagactgtatcatccttatcttcatcttacaggtgagaaatctgcagtgaagaaaggtacatcccaaggggacaccgacagtaagcagcggagctgggattccagacacgtggctgggcctctgcaggaagaaatcaaacgtgtggaagggttggggagaggagatgcctagaagggattttcctgtattctcttagtggtgggggtaagaccgaggacccaagtcctcactcatcacgtcctccccagtgatgcaaggatggagctggggtaaaaccagggagaatcaggaccctcacgtcgctgcgtttattaagcatcagggtcagagctgggcaggagaggaggggaggcaaggtctaggtgagagacgttctggaaccagccagtggggtggtaggtcgggaggtagatgtcacatgtcagggtcacttggcctgaatggttttttggatccagttcgtgtatctgcagacgttggtgtagactcctggcttctcctttgatccacaggggatgttaccccatgacacaaggcctcggaggtggtctccacataccagcggacccccagaatcaccctgcaggaaagagggagaaagtcagatacagatagaaacccagagactgtgtgtgtgtgtgtgtgtgtgtgtgtgtgtgtgtgtgtgtgtgtgacagagagagaggtagaaagggacagaggtacttactgaaagatggagagaaagactcagggacagagagacagagagagagacagtaagacacacaaaggcacagagagagaatggtagagagagaataaaggagactcaaagacacagagataggaatgccaagatgcagaggaacatagagagcaagaaagagaaacaatttaagaatggagactgagaggtgtggagagaggcagaggtgtagagaccgatggagagagaggaggaggaagaggagaaggaggaggaagaggagaaggagaggaggaagaggaggaggaagaggaggaggaggaagaggaggaggaagaggagaaggaggaggaggaggaagaggaggaggaagaggagaaggaggaggaggaagaggaggaggaagaggagaagaaggaggaagaagaggaggaggaagaggaggaggaggaagaggaggaggaggaagaggaggaggagaaggaagaggaggagaagaggaggaaaaggaggaggaggaaaagggggaggaggaagaggaggaggaggaagaggagaacgaggaggaggaagaggagaaggaagaggagaaggaggaggaggagggggaagacgaggaggaggagggagaggaggggggaggaggagggggaggaggagggggaggaggatggggagggggaggaggatggagagggggaggaggatggggagggggaggagggggaggaggagacgataagacccaggtgggagaggtagggagggcccagggagagatatgcctggcactattctgtccagggacacctctccacctcgtgtcttgaggacagtctcgcccacctgccctttctttgcgtccaacttgctatgtatcgctttccctgtctctgtccctgtttctgcctgtgtctccgtttctgcctgtgtctcccccttggttggtctctgcacatccctcagtgcattagtcattctggcataaagaggagagcctggatggatgacaatggaggaaacccaagttaaagtattcgggagggagtcccctttccccagctagtgtctccctcctccagagcctggtcgtttctgagcaggactcgtgggggctctgtttgaggaaggacagtcccctcacaccatctgcttccttactacttctctttggttctttttgtttttagacagagtctggctctgtccccaggctggagtgcagtggcgtgatctcagctcactgcagcctctgcctcctgggtttaagcaattctccagcctcagcctcccgagtagctgggactacaggtgtgtcccaccatgcttgcgtaatttttgttttttggtttttttttgagacggaatcttgctctgttgccaggctggagtgcagtagcatgatctcgactcactgcaacaacctccgcctccaggttcaagtgattctcctgccacagcctcctgagtagctgggactacaggcgcctgccaccacgcccagctaatttttgtatttttagtagagatgaggtttccccatatcggccaggctggtctcaatctcttgacctggttattcacccacctcggcctcccaaggtgctgggattacaggcatgagccactgtgcccatcctaatttttgtatttttagtagagatagggtttcaccatgttgatcaggctggtctcgaactcctgaccccaggtgatcctcctgcttcggcctcccaaggtgctgggattacaggcatgagccactgtgcccatcctaatttttgtatttttagtagagatagggtttcaccatgttgatcaggctggtctcgaactcctgaccccaggtgatcctcctgcttcggcctcccaaggtgctgggattacaggcatgagccactgtgcccatcctaatttttgtatttttagtagagatagggtttcaccatgttgatcaggctggtctcgaactcctgaccctaggtgatcctcctgcttcggcctcccaaagtgccgggattacaggcatgagccgctgctcctggcctctctggttcttgatcccgcggcctccatccttgtctctgcacttcctgtctctgctggctgtgtctttatatctctgcatatccctgactgtgtctctgtgtgttgaactaagtctcttcttttcaaggcttgggttctccctcagcctgtctctatctgtctctgtaaagctctcttttggcctgtgtctctctcttcctgtgtctggccatgtttttgtgacttcgtcctgtccctggctgtgtaagtggcagatccgggtcacctcacctggcaggaatccttcccgtacttctcatccccagcacacaacatgttctgggtgatctggccagggtaggcatgctcacactcctcacgggacaccaggtggatgtatgcacactggatggtgtcagggaaatcacctgttaggggagagatgggccagactcagcccaggccttgcactcccctcatcctccccagtcaccccccaacccctataagtcctccatcctctattggtccctcttttctattggcacccctcttcctgtttgtctctcattcttacatctcattaccatcgtccctgcctcctaattggtccctctttctatcattcttcccccccattggctgtcttcctcattaatagtctcttctccaggagtcctcatttcctattggttttccttttctcttaggtccctcctccacttttctctcttccactggtcccaccttcttcagtagtttcagttgacctggaggactcttcctctgttacgccctcctctactgtacccctcctgatcagtagtccattcttcattggacacttcctgcccattgattcatcttgattggtcactctgtgaccattggtcttttcctaactggccatgccctctcccattggttcttcctttctattggttcttcatccaatggtccacctccatcattggtccttttctaactgtccccaccctccctcatggatcctccctttctattggcccttcctccaatggtctaccttcctcattggtcctttcctaactggccctgccctccctcattggctctctcttcctattggtctgcttccctccttggtccttttctaactggcctcaccatcccccactggctctcccttcctattagcccttcatccaatggtccacctccctcattggtccttttctaacttgccgcatcctcccccattgtctctgccttcccactggcccttcatccaatggttcacctttcttattggcccttcacacacaggcccaccttcatggatcctgctgatctattggacctgttttttcctctagtgactcctctggaccattgatcctttccccttagtccctcttccatcagctatacccccattcactgtctcaattcacatccttcagttggcttttgtgctttattggtttctcttcttccatcagttccttctccattattccttcctgctgttcaatgaatcctgatcagtcccctttgacctttgacatccttcctgattagcatctccccactgaccttccctctttattgaaccttcatcttatgttccatctctcccatgctattcacccattggtctacattttccattggctgttcactcactggcccagctcccaaattcactctccctcccccttgacctttctcccattgaaaccctgtcccattggtcctcaccattagcccatcttcccatggcccctcaccaattttcccactccccatcctttggcacacttccccaagtagccagtagcctgctccccaccagcctcccactactgaccatctgctgtcttgccccagcccaggatgtggcagctggtggtgttggctgagcagtccctctccaggggaaggggctggatgagttcagagagtttggctgggcgtgccaggcgcaacagcatgatgtcctggtcatggctggcggcatcatagtcagggtggatcacagcccggacaacagaactctgctcctgggaactctccctttgccgaaggttatgcttccccaggaagacctgaagattcctgggaaggaagagggctgggtctcacctggagcccttgggctgcagttgaggcttcagagagggctgggaagtcatgaatcgctggcctgctcctcccacagtcttccccagctgggtaaatggcaattccatcctttcagaataatcttgggggctattcttcactctctttatttcatgccctacatccaagctgtccagaattccttttgcctctctgaagcatatccagaatctggccacatctcacctttcccacggctaccatcttggtttgagctgccttttcacttcctacctgaactagagcagtagcctcctcactgggctccctgctctgtctctggtcccccacagtccatcctccacaaagcaaccagagatattttaacaatgtaagttggtcctgtgcctcctctgctcagcccctcctatgactcccatctcactcagaatcaaagccaaagttctcaacgtggcacaccaggccttgcaagcactgccccatcatctcacagacatcttctcctcccactctccccttctctccctctgctccagccaaacgctggcttccctgtcttgccttgaacacaatagtgatcttcccacctcagggcctttgcactgctgttccctctgccagcaagtctgtcctccaagtatctgcatagctcactccctcacttcctttaaatgtcgcctctcagggaagccttccttagttgcccaattaaaatacaaatacctgttagtaggcaattcctatctccctcccctgctttctgttccaccagagaacctatcacaatcatccgacctgctatatatttattgttaaatatttactcattgtgttatttctcctccttgcagagcaatgctgtccactaaatgctacgatgccatgatctcgatctgcactgtccagaggtggctgggggaaccacaagctacaggtggctgctgagtacttgaaatgtggcttgtggattttccatttcattaatttcaatgtaatttgctatatgtggctgatggctaccatattagacagtgcagctctaggatgtcaagatggggatttttgttctattcagatatagtatctccagtgcgttgatcagcacctggcacaggataggtgtttgatacatattcctgaaacagagagtcactcccttgctcagacatcacccatggctccccattgtcctaagaataaagcctgggctcctccacttggcactggagcccctgtgtgatctggctgtagtcactttccaaccttatctcccagcaccttctgccccccagtgaacgggaaattttattttctgagaatactcaagacggttctcacctcaggggtgttatcacagcctttcctctgccctgaacattccttttcccatcttcatgcctccgcttggattttatctcattagaaagtccttcctgaccctcctccatctaaagtaggtacccgtattcttttccttcataatttgtaattatatggggttttgaagggtttgcttcttttgtttgtttgtttttttgagacagggtctcgctctgtcacccaggctggatctgcagtggtgttctgtagatcacagctcactgcagctttgtactcctgggctcgagtgatccacccgcctcggcctcccaaagtgctgggattacaggcatgagccaccacggccagcccaatttgctgcttctttctttcctttttttttttttagacagagtctcgctctgtggttcaggctggagtgcagtggcgcgatctcggctcactgcaacctccgcctcccacgttcaagcaattctcctgccttagcctcccaagttgctggaattacagaagcccaccaccacgcctggctaattttttgtattttcagtagagacagggttgagccatgttggccaagctggtctcgaactcaggtaatccacccacctcggcctcccaaagtgctgggattacaggcgtgagccaccatgcccagccctcactttgcttgtctgcacctttctgtccttgtgctcccgagggcagggatgacgtgtgtgtcccatccattgctgaatctccactgcccaactcgaatgtggcacttagcaggtgctcttagtcaatgtacatcaaaggaatgaatgatggtggtgagagtcatccaaggtctccttggggtcaggggaaccaccccagggattgtcacttgctatttccctgcacctcagtttcctcatttgcaaaatggtgccaagagtcccttgtggtgggcattccaggaaaggtgtgtacatggtttcactcagcacctgattggtagttagcatcaaacaagtggcagctgtcgtgaatctgactagtgaggatcagcgcccagggtttttgtcctgggccctccagctcctccaactatgccagctttttggatgatctcatctagtcccatggctttaaatacacctgtttgctgacgatgccttcattttaacctccagccctgacctctcctctgagctccagagtcctccctggcctccctgctgggacatctccccggcatctccaactcatcgtggctaaagcaaaatgtcagatgctcccctgcctacacccggcctgtttctctttccctctcccacaactcagagaaagacgtggcaaaacacccagttgttcaggacaaatacacggaagccagccgtgcttcttcctctccctcctgttcctcgttgccagattctgctggctcagtctcagaattccacatcccaagatattcaacatccctccatccccactgcgaccgcctgggttcaagccaccctcctatgtcgccggatgaaagcaacagcccccacgtgggcctccctccctctctcttgcccagaccacgttccacgtggtagccagggtgcttgtaaaaatgtaaatcaggctgggtgtggtggtggctcatgcctgtaatcccagctctttgggagggcgaggcgggcggatcacctgaggtcaggagttcgagaccagcctggccaacatggtgaaaccccgtctctaccaaacatacaaaaattagccaggcaaggtggtgcacacctgtaatctcagctacttggggtgctgaggcaggagaatcgctggaacctgggaggcagaggttgcagtgagctgagatcatgccactacactccagcctgggtgacagagcgagactgtgtctcaaaaaacaaacaaacaacaaaaacaaaactgcccagtggcttcctactgtgctcagaattaaatccaaatgcccatcacgccctgcaggtccccaaatgatccaattcccccattagaaagtaagttcaggaaaacagcaattttgcttgtttttttttgttttcttttttttattttcttttccactgctatgcccgcagggcctggcacacattaagtactcaattaagcaacagccgaatgcacctggctatcagatggcctcgtgctgggatgggggggatgcctatgtcacctcctgcctgacatctataagacaccctcagggttcagtcgcatctgctgttcatttacagtgtagactcacggttttttgcagtgggcagctgtgaggacccacagtggatggataaggaccccaccacagagcaagtggcccgaggtgtagagggcagcttggtaggggtgagatgtcttgtcgcagggtccgccatgcaccaacttattctgctcctctgcccaggctgagggagagaagatctgagtcagagaggagttctggagaaaccaagcgcatccccctcaacatgaactccagtcaagattggtcaggtgcagtggcttatgcctgtaatcccagctgaggcaggaggatcgcttgagcccaggagtttgagaccagcctcggtaacacagtgagacctcatctccacacacacacacacacacacacacacacacacacacacaaattagcagggtatggtggcatacgcctgtagtcccagctacttgggaggctgaggtgggagggtcacttgagacccaagagttcaagtctgcagtgaactatggatcatgccactacactccagcctgggtgacagagtgagaccctgtctcaaaaaaaaaaagcttctctgtatttccactcccaaacttaccccattcccattacaaacccaactgtatcccctattcccgggctctctccaactttccaacctacctcctacctcttctatgtttagatccccatccctaaagccaaccccaccccaaaccctcatatcttcaaacccacctcccaccaccctccctatctgtattccccacccttagcctaatccccaacgtcttcctcatttcaaagctcccccaccccaaccctgtgcatatccccatccccaataccagcctcttctccatcaacaagcccaaccctgtctgcaagcctcccccatccaaatgccctttccccacctgcagcaatcagactcagcaccaccatcagcttcttcatggccgctcctgagaggggaagccacatggtccattagtcactgcctcgaccctccccccatccctctgtctgctccctctgcatcctctccttccttcctggcctgctatggtctcctgccttgacctctgtccttcccatctagcctcctgatttattcttcctcagcccacatcttccatcagaggatcccacgaaaacagtgccaaagagaattcagaactacgtccactggtccagtaacccatggtgagattctgattagatctttctactttcttgggcactgatttgccttcctgtcgacaggagagggttaccctagggggccctagcgttcttcctctgtatgggagttttcctcggagcctggctctgtgcgcaatggccacccaccccgcccacccggcaggttctgtgatgtctgtgatctcacctgctgcaggcctccgggctccggggattcttgagtcgggggaaggaacagctttgagacgaggaggcagaaagagttagaaatgcggggagccgtgaggagagaagacactcagatgcagtggcagagccaagcggaggacgcaggggccgcagagcccagggctgcagggactgccagacacacacccccagctcccaggcctccctggaagaggctggttctgtccccagatgcttctggaacgtccttttaacccctgtctctcaggtccctgagccaggagactggctacacccttttcctccttacccaggcctcccacacacattcctcccgcccccacgctctgctcttggtgacccctgaccaggcctccagggaagggagcactggtccctgagtgcagtgagggcctggactcctgggtctgagggaggaggggcttgggggcctggactcctgagtctgagggaggaggggctgggggcctggacccttgcgtctgagggaggaggggcttggggcctggactcctgggtctgagggaggaggtgagaacttggactcctgggtctgagggaggaggggctgggggcctggactcctgagtctgagggaggaggtgggaacttggactcctgggtctgagggaggaggggctaggacctaaactcctgggtctgagggaggaggggctggggcctgaatctgaggcagaggaagttctagtcggctcagtccttagacctccgggttttggagaaagaaagtgtctgaagacaaattccggcctctggggcaagcagatggtgccccaggcctccctgcacccccagcactctctgtgccacccagggacctgcaggccctcactccgggctctagagccctccggcactgggaagcagcctgcccaggttcagtgcggttggggtgactcacacacctgcccgtaggtccctctgtgtgctgcctgccgacctctgtgtccccaggagagagcgagccagccagccggggagacagctacagcgtgtgtcaccacactggcccccgcccctgccccgggctggggagcaggcccaggcgcgatggggaaagggcccaggaacaatcgggctttgtccgcccccagcaccccagtgccatgctcccagcagctccggcctcaacctctcttccggcgggcaggcgggagggcggttacatcaatggcttccttttgtccctgtctgacagtcctcctttgcagtctctgactgcccacctggccctgactggagatttcggcactccacatcctcctggtccttctcctccaagtctgcccacccctgaggtctcttgctccatctgtctccctggccatggaggggagggagcttccatctctctctctctcccatctcagtctctgtatttgtgtctctctccctctttttttctctctctcccttcctctctcccttcctctctcccttcctcccttccttccttccttctttctttccttccttcttttctttctttctttctttttttttgacggagtcttgctctgtcactcaggctggagtgcagtggtgtgatctcagttcactgcaacctccgcctcctgagttcaagcagttctcctgcctcagcttcccaagtagctgggattacaggcacccaccaccacgcccggctaaatgttttttgtatttttagtagggaagaggtttcaccatgttggccaggctggtctcaaactcctgacctcaggtgatccacccaccttggcctcccaaagtgctggattacaggtgtgagccactgtgcccggcctctctccctttctttccccttgattctctgactctccgtgcttatcttctcctgggtctcttcttagatttccccgggggtagcactgtgtgtgcccagaagggagtcagtttccccaggaagtagcggggatgattcccgagcgatgaggaagctagcaggatggaagaggacttgaggacttattgatgagatgcggacacacagcgagaggcatggagttaagcagaaatcggagagcacttgggaacgacgtggggctgtgataagatggtggtgctgggcagtagcagagggatctgggaagatttagggaggtgtctttgaacttgggcctagaaagctgagccaggcgtaggtcaggaggaaaggccgtgaaaatgcctggcctgggtgcacatgggaaaccacaggcagtggttggggtggttggtatgggctggagggtgagggtgtgtgcgtggcagagtggagagaaatgaggagggggaagtcactgcgtaataaggacaatgataggaatgaagtctggctcagcacctgcttgggctgggcactacaggtaacttaaaaaaaaaagttcttttttcttttgagacaaggtcttgttctgtcgcctaggctggagtgcagtggcacgatccttgctcgtggcagcctcaaccctcctgggctcaagcgaccctcccgcctcagtcttcccaggagctgggaccataggcatgagccactgttcccagccaacccttttctttgtcttgcattgaatctaattgtcatcttgcattgtgcaccccccatcactccagggatgaagactacttcggtattcagtatactctccgggtgctccctctcacatttggtccccactgacctcagcaccttcttctcaggacgtgctatcttcacagacagcaagtctgatgttgcacaacccagtgaccaggccctatccctctgcctcctctctctggggggtcccttcctctctgtacccacaccctcaaccccaactcagagctgcacctctcccacctggaccaggatccctctgttctctgtatcccttgccccagagagaccttcctgtgccttgtgctgaccttgcccctcctctcacagacgtgccctgggtccccatctcccttgggaccaagtcccagccccccagcctggcatttgaggacctttagcatccagggaagtcctggccaatgaaatgtgatgccaagcacgcatgcacatttacattttccaatcaccatacttttttttttaagtcagaagattttttaagtgtccttaccacaaaaaataagggtgtaaaataatgcatatgttaaatagcttggtttagccattccacaacatatacatacatatatcaaacatgatgttatacaccagaaatatatacaatttttacttgtcaattaaaaaataaatttaaggccaggcatggtggctcatgtctgtaatcccagcactttgagaggccaaggtgggtagatagcttgagtccggaagttcatgaccagcctgggcaacatagtgagaaaccatctctgcaaaaagtaaaaaaattagccagatgtggtggtgcacacttgtagtcccagctactccggaggctgaggcgggagaattgctgagcctgggaggtcgagcctgcagtgagctgtgactataccactgcaccccagcctgacatggctgggcaaggtggctcatgcctgtaatccaagcactttgggaggcagaggtgggaagatcacttgagcctaggagttcgagaccagcctggacaatatagtgagaccctatctctaaaaaaaaaaacaaaaaaaagaaaagaaaaaaattacctaggtgtggtggcacacatctgtggtcccagctatgcagaaggctgaggtgggatagttgcttgagcctggaggcccaggttgcagtaagccataatcacgccactgcacttcagtgtgacagagccagaccctgtcaaaaatttttttaaaaggagtcctgagtggtgagtggccctcacactgcatgacacagctatgtctacgtctccgtgtggctccagctttctagaacacatcaagcttccctgacccatgccatgccctctggcctctggcccttcactgaatgctattccctcttcttcttgagatggagtctcgctctgtcgcccaggctggagtgatgtggcgcgatctctcttcgcctgctgggttcaagcaattctccagcctcagcctcccgagtagctgggattacaggcacacaccaccatgcctatatttttagtagagatggggtttcaccatgttggccaggctggtcatgaactcctgacctcaggtgatctgcctgcctcggtctcccaaagtgctgggattacaggcgtgagccaccgtgcctggcctattctctcttcttagcatgttttccccaccttttcctggcaataacctgtccttcaagtctttacttggacattacctcctccaggaaaccttccctgaacaccacccagctgccacctgctgtagttggattactcattctctcacgtaggttcccacagcaggtgtctccctcaacccaacctggacggggggccacctggattgacattcgtcatctcttccactggaccgtgagctccttgagggcaggtacgggactgactcatccctgtgtcccaagcaaccacacaggaccttgcccagaagaagccttaggcaagactgaccaaatgactaaatgactttatcacacccactcccattttacagataagaaaactgaggctcagaacgggaagttcattgctcatcatcaaacatccaggaaatggtggagcctgaatgggaactcagcttccaacatggcgtggatgtggcccatcccttggtggcctggctgggtctatcttatgacagtacgaggtgagtgaacttgggaggaattgttgagagctgggtggggaaagaagggaggtgttaggctgtggggagtggagggactttgaagagaaagaaatttctaactctacctcttctctggtgaccttcatggtttgccatctctgcatactttgaatgcttatttactggatagtttgctccagattgtcttgctctgcaaaactcttcactaaataaattcttctgtctcggtgcagtggttcacacctgtaatcccagcactttggagggctgaggtgggaggattacttgagctcaggaattagagaccagcctggacaacatagtgagaccccgtctctactaaaaaaaaaaaaaaaaatcagcccaggcatggtcccagctactcgaaaggctgaggcaaaaggattgtttgagcccaggagactgaggctgcagtgagctatgatcatgccaccaaactctagcctggatgatagagcaagaccctatgtgaaaaaaagaaaaaaaaaattataaggaaacttcatgagactgtaagcagaaaaaagtgccagaagtcataaacaataaaaaccaatgcctgggccaggcgcggtggctcatgcctgtaatctcagcactttgggaggtcaaggcgggcagattgcctgaggtcaggagtttgaggacagcctggccaacgtggtgaaacttggtctctactgaaaatacaaaaattagccgggcatggtggcaggcacctgtaataccagctactcaggaggctgaggcaggagaatcacttgaacctgggaggcagaggttgcagtgagctgagatcgcgccattgcactccagcctgggtgacaagagcaagactttgtctcaaaaaaaaagaaaaactaaactaaactaaactaaactaaaaccaatgaccattgaaggaaggcttacctcgtgccacacaatgtttgagcactttctgtatattaacttattgaatctctgtaataaccctagaaagtaggtgctttttctcccatttcaaggatgaaggaacagggacaggggaagtaatgagcttaaaggaaaatagcttgtagggactagaactgggatttgaacccaagaagccaagatccagagctagtcccttaactaccacactatactgcttacccaaagaaaaatgaattacttaaaaaaaatcaacattagtaccatctcagtcattgcaaaccaatctacctgtagcttgcgtataggagagcagagggccagggccagggatctccaggctgacttagtgcaaatgcaatgttttgttactttttaaaattccagattgaatgttggagtgccttgcagaagagagagaaaatgttgctaaaacttcaggggaatgactggtcgaaaatgtttgacattcttaaacttgacaggcccagaaacagaaggggctggggacctgggctcctgggtctgagggaggaggggttggggcggggggtctggactcttgggtctgaggaaggaggggctgggggggagcctggactcctgggtctgagggaggaggggttggggcggggggtctggactcctgggtctgaggaaggaggggctgggggggatctggactcctgggcctgagggaggaggggctggggggagtctggattcctgggtctgagggaggaggggctggcggcggggagcggtctgaactcctgggtctgagggaggaggggctggggggagtctggactcctgggtctgaggaaggaggggctgggggcggtctggactcctgggtctgagggaggaggggctggcgggggggggggtctgaactcctgggtctgagggaggaggggctgggggtagtctagactcctgggtctgagggaggaggggctgggggggagtctggactcctgggtctgagggaggaggggctgggggggagtctggattcctgggtctgagggaggaggggctggcaggggggtctgaactcctgggtctgagggaggaggggctggagggagtctggattcctgggtctgagggaggaggggctggtggggggggttctgaactcctgggtctgagggaggaggggctggggggagtctggattcctgggtctgagggaggaggggctcgtgggggcaggcctgcactcctgggtctgagggaggaggggctggggctggtctggactcctgggtctgagggaggaggggctggggggagtctggattcctgggtctgagggaggaggggctggggttctggactcctgggtctgagggaggaggggctggggggagtctggattcctgggtctgagggaggaggggctggggggtctggactcctgggtctgagggaggaggggctgggggcctggactcctgcgttttctgtgttagcctcctatatgggagaatcagaattagcggctgcagaatttctgcaatatgacagggctgtggtgcctgggttaggagagactcagagggagatgagataaggaggggaaggatctggaggatcttggtggggagggaattctgggagaaaaacaggaagaacaggtaggagggcgtgtcctgggctggagtggctcctcggtcagcagcgtctgaggtgtgaccacacagaggatctttgatgttagatggctggggctgtggccaggctctgagtcacagaggactcctccctcatcctacccgcttcccgaggttcctttccctcccttcttggggagcaggtgccaccatcttcctccggcactgtttgcttacttctggcagacccccgtgggacccctgtgtcctgtctactgtcatcccaatccctctgaaaaccgccagcctccctcctcacttgtcactcgtgagatgctcagaaacactttcacaccccttcccacgctgatgaagttggcctgttctctcctccctcctcccttccttcttcctctctccatcctttcctctctctcccattttacagacaggaaaaactgagatctgggaaatggaaatatgccctggaacagggccggcaggaccagggctcaaaaccaggcacatatttctttctagtctcccttcctgaaaggtcacctctctccaatcttagatcttcagacttttttccccacctttatttttcatgttataaaagtgcacattcaaggaaaagtacacagaaggaaggagacacctcatgacgaccccagtatgcagtctgggacatgtgttttcagatctgattctgtgaatatttcattttttatgggtagggtcacatacatatatatttttgtccttccttttgtcatttaacatcctatagcctaaatgttcttgaataatactgacaattctgtctaagtatcatttttaataggtttgtaatatcattgtgggctggccgtggtggctcatgcctgtaatcccagcactttgggaggccaaggtgggtggatcatctgaggtcaggcgttcaagaccatgctggccaacatggtgaaaccctgtctctagtaaaaatacacaaaaaattagcctggtgtggtggtgcacacctgtagtcccaggtacttgggaggctgaagcacgagaatcacttgaacccaggaggcggaggttgcagtgagccaagattgcatcactgcattgcagcccaagcaacagagactctgtctcaaagaaaaaaaacatcgttgtgccaagccagactattatttaagccatctggtacttttggaacatgtttgatggtttcacttcatttctgtgataaataatatcatggtaaattcaagtcttgttctacattttggattttttttgtttcagtaggttcttcctaagattagagttactgggtcaaaggtggtgaataagggtctcggtgtacgttgaccaagtgtcttccgtaaagactgtacgaacgtccagttccagtgtttgagagtgctggtctcactgactcttctccagcactgagggttttgtgtttctttatttgttttggttttaggtctttaccaatttgattggtttatcaacagggcatgaggttggtttaaatatatctttgaggaaaggtaaagtcaaatttgacttcataggtcatcggcgtcctcactcctgtgcattttctgttggaagcacacagttaattaactcagtgtggcgttagcgatgctttttcatggtgtcatttatccacttggtgaacttgcacacttgagtgtagactcctgggtcattgggttggccgcaagggaaagttccccaggacaccagaccttgcagggtacctctgcacaccaacggtccccctgagtcaccctagagggaatagagccggagattaactttggcttcagatcaaagcccaactcattctcatacattcctcagttatcggtctttgtcttgcagattatggacttccaccatagccaatgagaagagactcattgtctctggggactaatgggagagctagtgctagggacacactaggtcctttgaagacactggtttgacccttggccaatgagaccaattgcagagaaggggtggggcttccaggatcagagcactctttattttccaatgttaaggaccctgctccaagctagtgggagaaggaacatcatctccaaggggtggatgcgtgccctgtggcgcaggaaagggggacacgatggtctcggagaccagggtgaagaccagttacataatttacaggacttggtgcaaaacgaaaatgcagggccctttgttcaaaaattattgagaatttcaagacaacagcaggaatgcattagactaagtttgagacccttctgagtgtggggctctgtgtccgtgcagagcttgcacattcatgaaactggccctcaccaggggagaaggggaacaccctattctctaggacagtcatctctctcccatctcctctatccctaacactcaccatcccacatcccctgacagctgaaggtgcagatgtgagcaaggaggatgggtgtggagagacagagagagttggaggtggagaagaaagagggaaaggagagagagacaaagagagatgaggaagagggaaagggtatggggagagagagagacagagagatgggggtggaaaagaaggagggagaagagagacagacaaagagatgagggagatggggagggtgtgggaagagaagagagagagagatgggggtggagaagaaagagggagaagagagagacaaagagaaagggggggaaggtgtggggagagagatggggtgggggtggggagaggagagagagactggaagagaggaggagaataaagagagagaaagaaagacagagatgggggagcggcagggagaggagagagatagaagaaagagaaagagagagacagtaaaaaggagggggcaaggagagatgagggagagagatgaagagagacagagaagtgggggagagagagaaagaggagagggccagagaggagacagagagagaggaaaaaagagagagcaggggggcagggagaggagagagggaggggaggagagagagagaagcaagagaaagagggagaagacagagagcagagaggagggcatggagagagaacaagggagggagagcaagctagctcaacacagagaaaaaacaaagaggaaaagaatgaaatgaaattatgtcacaaagagagatgtgggaagactgttcagaaacagaggggatgacaaaaggccagaaagagggaacagagaggaggtggagagaaagagtgttttccccgggaccagggccagggtcaggtgagtgagtcatcagcttcaggcacaaaatctcagtaactgcaatacacaatacttcaatgcagtacttaacgaaatcaaatgtaatacataaaactgcatgatgggcatggtatccacattttaaatgaagacagtgccagtacagcgctgtgctgagccacgctagtacttacggcaagggaaaattcagtaagatccacctgctctttatttaaaatgtgacattttgtccatcatggacttctgcatgagtttttatttttatttttaaatattgcattatgatttatctcaatcactgaggtttttggtgcccccttaaggtttgggcctgaggccagcacctcagtctccttccctggtcccacccccactttctcacccctattaaactctctgtctcatccccagggccacattggcccctaagtaaactcccacccctgacctaggcagagaatgaggtggaaaaagctgaggaggccaggcctggggggagggcaaggccgggcttggtacccagtcactcgggtcaagctctgtccctggggcatgcagacagggtacccaggactggggaggaattgggggggagggtctcacattgcaggcgtttttcttggagtcggggatgccagcgcacagcatggaattttccagtaagtccttgtaaaccttcgtgcagtcctggggggagatgagcttgacatccacgcacatgaggtcagagggaaaggtcactgcagggaggagcagggagagctgtcagtcagagaggatgggggcgaggaccagaagggctgttgttcaggctcctggttccgagggaggagggtctggggcccaggactgctgggtctgagggaggaggggctggggtctggactcccgggtctgagggaggaggggctgggggcctggactcctgggtctgagggaggaggggctgaggcctggactcctgggtctgagggaggaggggctgggggcctggactcctgggtctgagggaggagggctggggcctgcactcctgggtcactgaggccacctaccatctgggctcgtggtagtgccccagccggagacagtacaggtggttccagggggttcgcagcgggagggcagcctgactttcttcaccatggatgacagcctggcctggctattgagcttcacgagcatgaggtcattaacatgggtctgtgtggagtagccggggtggcggaatgacttcgaggccttgatcctctgagctctcctgtcgcccagcgtatcactgcccaggtgcacggtgtactcactgcgaggagtgacattcacagattcagaagagacactgtgacagagagggtgtgcaaagacctgggggacggggtggggacagagacccagagagaggaggggggacagagacacagagagaggaggggagacagagacccagagagaggggaacagagatccagagagagagggggacagagccccagagagagggagacagagacccagagagggggggacagagacccagagagaggaggggggagagagacacagagataggaggggggacagagacacagagagaggaggggggagagagacacagagagaggagaggggacagagacccagagagaggggaacagagacccagagagagagggggacagagatccagagagagagggacagagacccagagagagagggacagagacccagagagaggggaacagagaccagagagagagggggacagagccccagagagaggaagacagagagccagggagagagggggacagagccccagggagagggggacagagatccagagagagaggagggggaacagagaccagagagagaggggaacagagacccagagagagagggacagagacccacagagagaggagggggaacagagaccagagagagagggtgacagagacccagagagagagggtgacagagacccagagagagagggacagagaccagagagagaggagggggaacagagaccagagagagagggggacagagacccagagagagagggacagagacccagaaagagaggagggggaacagagacccggagagagaaggggacagagacacagaggggaacagagatccagagagaaaggcagacagagacccagagagagggggacagagccccagggagagggggtacagaggcccagggagagggggacagagatccagagagagagggggacagagaccagagagagagggacagagacccagagagagaggagggggaacagagacctagagagaatgggggacagagacacagagagaggggaacagagatccagagagagggggacagagacccagagagagggagacagagagccagggagagagggggacagagccccagggagagggggtacagaggcccagagagaggaggacagagacccagagagaggagaatagagccgtaggcacagaaagactgcccttccacccccatagcgagctggagacgctggtgcacctccagcagagacttgggcggcacctacttcatcttgcagtgggcggcagtgagcacccagcgctcattgaccaggacgcctccgcagtggagctgattgccactgagcagggccacctgccatgggtgggagcctcttgcacatggggcgccatcaataatcttgtcaccctgggctggatggagacatggaggagcacgtgggtagctagcattaggggaaggctgaggctgcacctcagggattcccagagtcagagatggacagagacagatgaaaatgtgtggagaaatacagagaaagcaagagatagggatagagacagacagaaggagcccactcagaaacccaggaggcgcatctcatctggggaaccacagagagaccctgagcacaggaggcagggcctggaggggacagagaccccctgagtcagcagaagcaggaagagcgggggcttcagccgacagtctggtcctcccaggatggaagctgtttgaggagggaagggttctgactcagggactccttggagagggtcagtgggggccctgaggtgaggtcagacttcccagtccagctttcaccttcttctcctgcagtttccaaggctaaggatagcagtaagatctgcaggggcaggagaagggatcttgccatggtgccctgctgagccgctcaggggctgccaggcgaggaagggcctctcctgctggagctgagaaggagaaagcattcaggcccagcccctccccactcagacccaggggtccaggccccagcccctccccccacagacccaggagtccaggccccagcccctcctccctcagacccaggggtccaggccccagcccctcctccctcagacctaggggtccagaaccccagcccctcctccctcagacccagaaattcctttctctggcctctccttccttacactcagaagtccagacccctaacctcctcctccctcatacccaagagtccagaccctagcaccttcctccctcagacccaggagtccaggcccccagcccctcctccctcagacctaggagtccaggcccccagctcctcctccctcagacctaggagtccaggtccaagtccctcctccctcaggctcaggagtccaggccccaacccctcctccctcagacccaggagtccaggcccccagccccgcctccctcagacctaggagtccaggcccccagctcctcctccctcagacctaggagtccaggtccaagtccctcctccctcaggctcaggagtccaggccccaacccctcctccctcagacccaggagtccaggccccagcccctcctccctcagacccaggagtccaggcccccagctcctcctccctcagacccaggagtccaggtcccagtccctcctccctcagacctaggagtccaggtctcagtccctcctccctcaggcccaggagtccaggccccagcccctcctccctcagacccaggagtccaggccccagcccctcctccctcagacccaggagtccaggccccagcccctcctccctcagacccaggagtccaggccccagcccctcctccctcagacccaggagtccaggccccagcccctcctccctcagacccaggagtccaggccccagctcctcctccctcagacctaggagtccaggtcccagcccctcctccctcagacccaggagtccaggcccccagcccctcctccctcagacccaggagtcgagacccccagcccctcctccctcagacccaggagtccaggcccccaggccctcctccctcagacccaggagtccagaaccccagcccctcctccctcagacccaaaattcctgttcttcagatccctagagacccaggaatctaggctccgatcttgcccttccctgtggaacccaaacttctgactctgtagttcgtttttccctaaaaggccccaaattgcagacttccaggccctcactgctcaggaccgggagtctaggctgcagcccctacctctcgagagcagagtcaggcttggagccagcatcaccctctcccctacaggtgcacccttgatgaagcctcttctcacctcgagaggatctgatgtgatccaagttccgacttgggctggcacacagctgggctccaaaatcttcatccctctgctgggccgtcctcttatatcaccccccgccccatgcccggccccagcgccctggggtgcaggcggagccgactctgggacacccccgcctgcatttgcggttctggttatctggaaccctgacgcagcgagagcaattggcaccactgcactctctctccaccctccctccgaaggacgggcggtgcccagctcctgcgcccccgcacattctggtcccacagtccctcctggctgctctcgggggagggacccggtgcgctgggtctgaggggcaggagcgggattcaagcagtcgctgagctcagagaataggctctggctcgggtccttctctggggcggttttctttctttcttccctcctccctccctcccttcctttcttttttttggatggagtctctctctatcgccaggctggagtgcggtggcgcgatctcggctcactgccagctccgcctcccaggttcaagtgattctcctgcctcagcctcccgagtacctgggattacaggcacgcaccaccactcccagctaatttttgtatttttagtagagaccgggtttcactatgttggccagaatggtctcgatctcctgacctcatgatgtgcccgcctcggccccgcaaagtgctgggattacaggcgtgagccactgcgcccggcttctggggccattttcttgccctcaccccctctcaggggtggcctagaccctacatcctaattctggcccgcctgggggaacttgtccaagctgatcccagtcgtgcctgtaattacgcctgaacccattcccaactctaacagagaggtgtaagttaaaaacaacgctttccctaaccccaccccactaatatttgccatgtttaggatctatgttcttatggtcattttaatcatgttatacatagatttctttgtatattatgtatttataacaaaaatgtctgtacttaacattatctaatagaacatttttgagggcttcatttattaatttataagcaaatatttatttttctttttttaacttttcagttcgggggtacatgtgcaggatgtgcaggtttgttgcgtaggtgaacgtgcgccatgggggtttgttatacagattatttaatcacccaggtattaagcctagtacccattagttatttttttctgatcctctccttcctcccactctccaccctctcataagccccagtgtgtgtacccaaaggaatataaatcattctgtttaaagacacatggacacgtacgttcattgtagaactattgacaacagcaaacacagggaatcaacctaaatgtccatcagtgatagactggattaagaaaatgtggtacgtatacacaattgaatactacgtagccataaaaaagaacacgatcatgtcctttgtagggacgtgaatggagctggaggccattacccttacaaactaaagcaggaacagaaaaccagatatggcatgttcctacttacaagtggtagctaaatgatgagactgcatggacacatagaggagagaagaatctttcttatttttttttttttttgatggactctggctctgtcacccaggctggagtgcaatggcacgatctcggctcactgcaacctccactcccccgtgttcaagtgattctcctgcctcagagtcctgagtagctggattacaggcgtgcaccaccatgcccaactaatttttgtatttttagtagagatggggtttcaccatgttggtcaggctgctctccaactcctgacctcaggtgatccaccggcctcggcctcccaaagtactgcgattataggcctgagccaccgcgcccagccaaggatttttgctaaatgagtagattatagctgctcttgccacaggggaggaaaatgggtaactatgtgagatgatggacatgttcatttgttcagctatagtaatcattgtcctatgtatatacatcgcatatgatcatattgtacactttaaatatacacaataacatttattttttaaaaagaggaaaacttttccctctttgtacatttagattacttttccttcctttataatggttgtgtaatattccatactatacttgtatcatgatgcatgtcatctgcctcaaattgaaatacacttggatagttttaattataataatgctgagatgaacttctttgtacattcatctttgttcattgtagtcattcaaacagcatccattgagcatctactctgtgccagaaactattcaggctcttggagacacagcagtgataaaacagagaaaaatttctgtcttcatagaggtttttgttttgtactgtcaggtcagcacaaaaataagcaaataaaatgtagagtttgttaggtggttgtaagcgctataagggaaaatccaagcaaggaagagggttggggagttactgattccctctaccctcgaggatccctgaggttataatatcaggaaggttggctgcaaagaccccacgtgaaggtgatatttgagcaaagtcttgaaggagatggtggagggatccaggtggctgcttgaaggtagtgagttccaggcaaagcgagcaggcaggtgtgttagccaaggagcatatctgaagtgcctcagcagacaaatcactgcgaccaatacagagtgaccaaaggagatgagggcaggtgatgaggccagaaatataacaggactctgatgacatgcggtctgaaaggtctttggcttttattttgagtaagacaggaaccattgttggacacacttctaaagttggaattgacctcaacctctaaattatatccccaaaatgggatttatttctccaccctggacctaaaacttatctcaatcctgaccccaactcaattcttttttttgctttgttttgttttgtttttgtttttgagatggagttttgatcttattgcccaggctggagtgcagtggtgcgatctcagctcactgcaatctccgccttccaggttcaagcaattctcctgactcagcctcccgagtagctgggattacaggcatgtaccatcacacttggctaattttttttttttttttttttagtagagatggggtttctccatgtaggtcaggctggtccctaactcccgacctcaggtgatctgccttcctcagcctcccaaagtgctgggattacatgtgtgagccaccacgcctggcaccccaactcgattctacatttgacccataatagtagacattattgttgtgtccccaggcattcactccttctgcctttctatcagaggctccattttgtttggataatactttatcctcatcaggactataagcctcaatgaaccaagcattgaagccatatttcgtttgcttaattagttggaaaatggacatgtgctgttcttctggccaatgaggaggaggggaagaccactgaggcacttctaggaaagactttctcattttcaaaaagaggcactgaaaggggacttttttcttctgctagatggtgtcttttctggatgcaaattctggaactgtggcagcaccccagggaccacagagggaagtgaccagaggactaagtcaaaacactgcaggtagcccaccagagaggtgaggatcagctgggtctttgatgaagtcactgagctggtgaattaaccaacgatggagcctcttcatgtcatgatttttcagattccccttctgggttagagttgcttggtccttgtagccaaaatcatctttataagacctcaatgttcaatcagaatattgactcagatcccaaatctgatcccaagccacaaatccaaatccgattctaacttgattccatatcttgaagccacataaatcaacaaactcaaccatgcctccagtcttagctctcttcccaaccctcatccccatatcccatttcagcccatatcccattttggccattgttaatgtgaagatgaccaatttaatttttagaatagtcttttttaaaaaaacaaattagtaatttggatcctatagctgactacctctcatctaaatttaattttttcttagtttttcttctatacagtggatttcttattttttagggaaaagttgttgattgtttatgcaatagtttaacaccaatcctttatatatttaacaaatatggattgggtggtagctatctaccaatgaggatacaatggtgtgcaaacctagatagtgtctcttccctcaaggagctgatagtgtcatgtaaaagaaatacagtcaattcataaacaagtgtaaaattacaactacaaggcatgctctgaaagacaggtgcagggtattatgaaggcacttccagaggggttagacccaggaattgactatgagctgagatttgaaagaatattaaactagaagaaatcttctaggaactagaagtagactagaagaaatcttctagtaactagaaatagtaaactagaagaaaatttcttctggtaactagaagaaaatttcttctggtaactagaagaaaatgggaggagaatggggagtgtgttgtgtagagaaaagagcatgtgcaaaggcccaaggcattattgctggagctcggaggccagaggttaactgggaccagataatgacgagctctgtatgtcattgtgagtcttgctttatcctgtggataatgaagaactatttgaaccttagtcagagaaataacataacaagatttgtattttcaaaacatcaacctagctactgtatgaaggctggatttgggtgggatgtgaagatactgggcaaccatgggggaagtcattgttgttgtctagatgagggaagatggtgacttggatacaggtggttgaaaggtggagacgatgttaagtacatgggttcaaaatgcacttaggagagagaatcaacaagccttggtgatggattgaatgaaggttgtgttgaggtagtggaagatgttaagatttcaaagtctgttgctcgatggacagtgatgccattcattgagaagacatggtagatgtggtcaaatggttctgatatgacaagaaaagacctcagaccctgacttcaagcagaaccctaaatccaacctttactttgacacaactcccaacacgtattttgacataagccccagcctttttgtttgtttcaatagctttcggggtacaagtggcttttggttacatggatgtatcgtatagcagtgaagtctgagattttagtgcacccatcacccaagtagtgtatattgtacccaatatttatagtgttttatcccttatcctcttcataccctcccccttctgagtctccagtgtccattataccacttggtacccactgcttagctcccacttacacatgagaacgtaaggcatttggttttccattcctgagttacttcacttagaataatggcttccaactccatccaagttgcttcaaaagacattatttgattctttctatggttgagtagtattccgtggtgcatacacatcacattttctttatccactcatcagttgatgggcacttactttggttccatatctttgcaattgtgaattgtactgcgataaacatacgtgtgtatgtgtctttttgatatagtgacttcttttcctttgggtagatacccagtagtgggattgctggattgaattgtagatctacttttagttctttgagaaatcaccatactgttttccacagaggttgtactactttacattcccaccagcagtgtataagtgttcccttttcatcacatccatgccaacatctattgtttttttgactctttagtaagccccagtcttaaccccaaaccttaatctgtacccaatcctgaacctcaaattctgctttatccttgatgaaccccaatttgtatctcaaccaataacctaaatcttgactgagttcttgactccaaatatcaactcaggctaggatccagacctcaatcaaacttaaccctcctgacccttgaccttaaccctgaaccattagccataagccaaactcaaccttgacctgagcagtgaatgtcaccatagcctgagtatcaagcctgccacgggataattcagacattagtctccattcccatcatattctaggaagcccacattcatatcctcccccatgaacccattccctcacatccaacaccaattctaacactctcaccccatcccacccctattctcatcctcaacccaattgctacctaaaatcccattctcatttccatccccaattcttttcccagttccatttttatttctccagctcaccacacaactttgactcttcattttacaaaaactctaaaataaagtctgccaacgaatatcttgctaacattgatgctatactaactcaactcaagccgagtcccaaaatcttctgagacatttactgtcatcgaatccaaaatcagatccccgaacttggacatctagccctgcccattccacagcagcaatctggtcgtgaagggtgtcaacattcctgacctgggctcccaaatcaaggagaagcagactccagcccagttgacctcacagctccatgattcagcaatctgtatctttccttcctggcttctcaaagacagaaatggtagcaagacttccagtgtattatctactccctgcatcttcatccttagattctctcctccctcagtcctctgcctccttagtatctgttagaaagaggaaggagccaggctactctagagccctgttattcactcctaagtcaccaaaacgtctatcctctgcttttcatcatctatcattctgtaaattatattcctaattatttaacctgattttgttgccaaacactggtcatcacaagcagaggaaatgtgtgtggggttctttttttttttccagcaccccgcccagaccggagaacacaggaggtacttaaataaatactagtctgcaaacttctggcatccacaggtccacaggccttagattcagtcctgccttgatccctgagctgttccaccatgcagtgtgacagaaagaactagaaagaacttggactttcaacccagctttgaatcctggttgcccaccctgtgacttcgggtaagtgacttcatttttctgagtcagactttgcccctccccaaagtggaggagagcaaaacctatttaccgaggcaaatgagaggattaaataaaattatgaatggaaaattgatgggcacataacagccagtgaattaacatgagttccctcagcccatcacccacggaatgaagaagcagctcccattttcccccctacatttagtgtggtgtgtctgtattcctcacattggtccaggtgaggattgtcatccccattttacctttattttttgccgcctgccccatcatccccattttatagatgagaaaatggaggtttaaaaaaggctagatcacttgagcaaagtcacagagctgaggagtcagaagtgtcagaattcagccaggcgtggtggctaaagcctgtaatcccaacactttgggaggccgaagtggatggatcacttgaggtcaggagttcgagaccagcctggcaaacatggtgaaaccccatctctactaaaaatacaaaaaattagtcggatgtggtggcatgtgcctatactcccagctactcaggaggctgagacaggagaatcacttaagccagtaagcagaggttgcagtgagccgaggttgcaccactgcactccagcctgggtgacagggcaagactccatctcaggaaaaaaaaaaaaaaaaaagccagaatttgaacattgggattcaaaggcctatggtatcactactgcacaaatccatactctgagaaggaaatttccttgttacatccacatgtaccctctgagtctcatttggttcaaaacagacttggatcgccctcagcctattaatgatgcatacccccatgtcagagagaggcccatatccaggccccctgtgccctttgcatttagtcctggcacctgttgctaagtgtcatccagacacccagccccatacctccatcgtcctcagacctatgtcctgaacctttgttaaatgactcatcttccaccttatgatcacacctgagaactggcatctgataatcttgccagctatgcctttccctgagggattctgaacactgtgaccctcgtacctcctgactcagcccatgggttctgatggcccattgtttcatacttcctggattctcttcctccttatttctttctttctttcttttttttttttttttttttttttttttttttttgagacagagtctcactctgtcacccaggctggagttcagtggtgcgacctcagctcactgcaacctccaccttccggcagaaccccatttcttttgggggagatgctgccttatttcttatagttctggtgaaactgtcaatcgtagttctccaactccacccacccactgaggcggagaaatgacccaggccaagtcaacaagatcagtgttttctctctggcaacaatgatagattcaaggggtgggcccagttcaaactggaccaattagagttcctccctgggattaatatcaagatgccaggagaaaggagatttttgtttctgttagtagctgctatgttccctccatgcccctccttagtacctaagattgagtaaatcaatccccaagtcttttcaggcttatgttccactggagacattaaagtatctcctggaccagcctaggcaacatggtagagtcctagctctactgaaaaaaaaaaaaaaatggctgggcgtggtggcacatgcctgtggtcccagctactcaggaggctgaggtgggaggatggctgaaacccaggaggtagaaactgccttaagcattgtttgtgcaatgctcactgtactgtaacctgggtgacagagtaagaccttgtctcaaaaaggaaaaaaatctccttggcattggatgatactaagaaagtatcaactgtgtaaggtgtgataatgtaagttggttatgtttaaaacgagtctcttttggaacaaggattggcaaatttttaaaataaagggccagagagtaaatattttagcttatgtggaccaagagagaaaaatggaagatattatgtagatatttaatagcaggaaagaaaataaaatttcacaatttttaattgatgaaattcaaaatgtagtaatgataatttagtacaaattttttgttgctattccttatcaagctcacgcctgtaatcccagcacttttggaggtggaggcaggcagatcacttgaggtcgggagttcaagaccagcctgaccaacatagagaaaccttgtctctactgaaaatacaaaaaattttagccgggcgtgatggtgcatgcttgtaatcccagctactcaggagactgaagcaggagaattgcttgagccagggaggcggaggttgcggtgagccgagatcacgccattgcactccagcctgggcaacaagagcgaaactccatctcaaaaaaaaaaaaaaaaaaaaaaaatttagctcaggagatttggtccaacagctgtaatttgccatcccctgttttaaaaatgcataataaaatatttaagaatgagatgttgtggtgactgagattgcttcaaaatattctggcattagggaagtgtgtggtgggagtataggtgaaacaataattggttttgcattaactttttttttgagatagggtctcactctgttacccaggctggagtgcagtggtacaatcatagctcattgcagtctcaacctctcaggctcaagtgatcctcccacctcagcctcctgagtagctgggaccacagacgcatgccaccatgcccagctaattttttaatcttttgtagagaccagtctccctatgttgcccagactggtcttgaatgcctgggctcaagcaatcctcgtgcctcggcctttcaaagtgctggggttacaggcgtgagccactgcaccggaccttgcattcattatcgaagttggatggtggtatatgaagacacattatgttattctattttgcatgtgtttgaaattttccataataaaaattataaaacaattctttgagttgagatgtcccccccagaaatgcatccctggcatcagaagtttaatgccatgcttgaaagacttcctcaggatttctggtatgggggaactgtcataaagcatcagggagattgatgaatgcaaggtatctcacacacccacgccccttgtggagaattgccttcccatagcactaagtggccatgtttcatatcacatgactccaagtagccactgattggctaagatttggtcacctgactgggatgccatcaaatgattggccattcagtgaccaatgatgtggctgaagaagaaaaggtgagctagatgaatcagattctctttcatgagactattttctaaagatcctagtgaaggaggaggcggggtttaactctggactagattgaagacagctggaacagggaaaaggcaccaaaagcacatctccataagacgtgcacaccagcaccatgacagtttgccactgccatgacaacacccaaaatttatcagcccttttctagaaatttctgaataacccaccccttaatttgcatgtaattgaaaatgggactaaatatgactacagaactggccctgagctgctactttgtgctcaatgcctatggggtagccctgctctgcaaagagcagtacctctgctactgtgcagtactgtttcaagaaaagtcactaacaccactgggttgcccttgaattatttcctggacaaagccaggaaccctccctggctaagctccagttttgggcccacctggcctgcaccactagaagagtgactatatccttgtaataactaccccctccacactcatctttccctaaaacaagttatgttaagcctttgctttaatgaaaactttcccaaatgccctttgcgtcacacttcaatttggacacaccactcatttccttctaccacagcagacaccaccagatggctctaggctgtgagaaagagttctatctggatttttgggagctctcaagatttttgacccgagtggtggtttcatggttgttcatttgtgaatatttaagctgttcatatattttctgcactcttttctatgcatatctcccaatgttttcccttttcttctttttttctttttttttaaataaaaatagagatgaggtcttacattgttgcccaggctggtcttgaactcctgggctcaagtgatcctcccacctcagcctgtgaaagtgctggaattacaagcatgagccaccatacctggcacaattattattattaatttatttgtttatttattttgagaccgagtcttgctcttgtcacccaggctggagtacaatggcatgatccctggctcactgcaacctccgcctcctgggttcaagcgattcttctgcctcagcctcctgagtagctgagtttacagatgcccaccaccacaccctgctaatttttgtatttttagtagagacggggttttgccatgttggccaggctggtctcgaactcctaaccgcaggtgatccatccgcttcggcctcccaaagtgctgaaattacaggcttgagccaccgcacctggccaattattttttaaagggggaaaattttatctccaaagcttgtaaatgctttgctcaggaaaactaaacacaaactctttcaaaactgtctttcacataccagcccactgaatgtttgaagacctttgtatgtattttctcccctgaaataaagctcttacccaagttcttccagaaaacgagggatcactttaggcagtggtgatggccaaagtgaccatgagaacttggtttctgcacatccccacctagtctgccagcaggaacaatcccggatccccatccagccctccccacagggccaaaacagagacaggcaaggaaccagagagttgtgagtttattaagggagatctagtgcttatcctagaatcagcccttgctgcctatgatcttcttgatccagtccaggtagcggcagatgttggtatagacgccaggtttgtcggacctcccacaggggtctgagccccaggatgtgatgccctggagtgcaccatcacacaccagggggcctccagaatcgccctagacagggagaatgagaacagccttgcatctgagatgtccacaacgtcccttttcctgctgtcccagcgttttaccagttctttggcatgattggtcccctgtagccaatgggggtaaaagcattgtcccctgagaccagtcaggacagggcttggggcttccatgtacagacagacatggtgtctaagggtagtggtcaaaacactgacagaagaggggaaagaatgaaatcccagacaggcttggtggctcacacctgcaatcccggcactttgggaggccgaggcggtagatcacttgaagtcaggcgttccagaccagcctggccaacatggtgaatccctgtctctactaaaaatacaaaaactagctgggtgtggtggtgcacacctgtaatcacagctactcgggaggctgaggtgggagaattgcttgaactgggaggcagaggctgcagtgagccaagattgtgccactgcattccagcttgggggacagagcgagaccctgtctcaaaaaaaaaaaaaaaagagttctcgagggtccaatccagggagaagacagtagggattacttggagaggactgagctgaagtttcctctgttcctggccaatagtgaaggcatcattgattgcagttgccaaacataggagaaaggatcaagattcttatggacacacacacacacacacacacacacacacacacacacacacacaccatatccccaagagaccatggctgaaatatttgtggaagagaccactatctctacagaacaatccagagactggctttcatggcagtatcgctgatggaaacgactccatttttggccaatggggaagaaagcattgtatttagggaccagtcattggcaaaggtggtggggcttccaggaagtggacaaagccaggggaaagtgctaggaacaacgaagttgcagttagaagagagagttatatctatgacaaatcccaagagaaagggattggagctcattgaggaagcactgaagtcaatggcaccatttactccagccaactgggaagacaccattgtctcccaaggaaccaatcacaggagaagggaaccagccttgggattctagcccggtctcaaagaaaagtggctgaccaccgggccggtggtaaagtcggcacaaattccacgatgtaatgctgggaaccagagagcaggcaactcgtctaaactctagcctcagactctctccttgctggacatctaccccaccctctatagcccccaactctgcatcccatcctgtagttaagcgttcgaaagaaaacagcagcagcaattcaatgctcctaatccctatgcagtgtgactttcagagagagagtttggcttctctgaacctggctcccaatccgtagagataggggtgaacactccgggtgccaagtctttggggtcactcccttaccacccccacccccatccaagccttgaacctcgagagggcaatgagggatgtgtgaggagaaggatttcagaaattgctcacctggcacgtgtcagcccctttgctgctgcctgcacagaccatgccatctgtgatctgccccgggtaagcatcctcacacttcttctggggaaagatttttacttctgcacagttgagagtgtcaggaaaattctctgagggggaagaggttgtaaggttccctgagagagcagccctttgcctccatccctgtctggatctaaccccctttctttccaggatgtaatgggggagttttccagctgcatgggggaattttctgacactgtgcacaggggacatcacttctcaccacattaaacgaagctgtacttgttgctattgggctttctccatctagagaggggcccttggatctcacgtgttttttcttaccctgagccattttcaaatcaaggggctgggggttacttggaggtgcccctttatgatacctctgaccctctctttccagtcttcctgccctcagacaaccgggtcctcaatctgtgctaaatcctgctccttccaagtgtcacctcctcctggaagccttccctgaccactcgaattaaaaaataccatccctccattactccctatccttttacgctccacaatatttccttacagcactttgcctaatgttttattttatgtgtatttgtttattgtctatttctcccacctagcttgcaactccataacgacaaggactttgtacagtttgctcatggctgtatatccagcgcctgcaacagcacctcaggcatactaggtgctcagtaaataagagttgaattaatgattgaaggtggaattgatcttttttattaacctcttttgaggaatagacttctccaaagcctctttgagggggaaaaacttccatctggcatctctacgtgccaaaagcaatatgctcataatctcatttaatcctcacaacagcgctttgaaggagagatgcattcattcatttcattatttattcatcaggtcatccattcaacaaatatttattgagcatctaccatgtagcaggcaccattctgagcactaggagaacacaatgaagaaaactgatgtaacctgaaccctcacgtagctaaaaaatctattggttaatgattcccattttgcagataaggaaagtgaggctcagagatggaaaggaatttgcccagggagaaagggcagagccatagtttgaactgatctacttgatttgcgagcacgtgtgtttccacagccgcaaactgtctcatccaaagcattcagagcaggagtgaggcaggcagggacctgaatgctgactttgccacttcctggagaagctccttgactctcttaggtgagtcccaatgttttcactgtgaaggaaggcgaggggctctctggattctggagtcccaaagggacagcttcattggaggtccagattttggggtccagagtcaagagggagctaggactgctgggtcctgggagaagaagggcctagactcccgggtctgagggaagaggtgaccagggcccaggtttcctgggttcaagaaggagaaaaaggccaggggcggtggctcatgcttgtaatcccagcactttggtaggccgaggcgggcagatcacttgaggtcaggagttcgagaccagcctggtcaacatggcgaaaccctgtctctacaacaaatacaaaaattagctcgcgtggtggcgggtgcctgtaatcccagctactcgggaggctgaggttcgagaatcgcttaaacccaggaggcagagattgtagtgagctgagattgtgccactgcactccagcctgggcgattgagtgaaactgtgtccccctgcaaaaaaaaaaaaaaaaaaaaaaaaaaaaaaaaaaaaaaaaaggagggaggtgggggagaaggtgcttaggagcctgttttcctgggcctctgagaagtccaaatatcccaagtgtgttaagattatataaaatcctatacaaccaaaggtcccatagggtagtgctctccgccatacaggatgggcttttctggccctgcttaacaatctgctagttggttctttctctcaccactcttgttagtagtcagatcttcgaggcttctcatatgactcctgcttgtgaatctcaacatcatgatcactttcccttctttgtctccctctgggggaccaagctttgccaatagcttgggttccactgggccaaccagctcctcctctccctcccattagtggacaagcccactacctcggggactggtgacagtgccccagcctgagacggtgcacttctggccaggctgggtgcaatgatctgccaggctgatgggcttcactttggaccccagggatgcctggtcacgcagttgaagaagcatcagatcatggttgtggtcctccacatcgctgctgttgtagcaggggtgtgggatggactgaaccacaggtatttcttgctctgggccatctttattctgtaggctgtggtctcccaggcgtactgtgtatttcctgtaatggtggggatagtttgggacccaggcaggggtattgcccccagccccctcctccttcagacccaggagtccagtcctcagctctctccttcctgagtcgaaaccccagccccctctttccttaagccccagctgacctctgcccccatcatccactcacggttttttacagtgggcagctgtaaggacccagttgccacctacaaggacaccgccacagagtagttgctggccctggaacaaggccgcctgccaaggctgcgaatggggttggcactcatgaccccccagcaccttgtcctcctgtgccctggagtgtcctgcagcaggagggagagggttggatcgccaccctctggggcagtgcgagggctgggaaggccactgtgggttcaaatggacacacggcaagttctccgcatacaacttagtgaggaggtccaggcttccacacgctgccacacggggacactcatttcagtccatgtgtcatcatacaagagtcacacacccaagaatgcccccacatgcttccacatgagtctacaggccccgagtactcccaggtgaatctatgcccccaagcaagcagcccccaaaggctgtagctattcagacaatttacagcatcacggaacctactcctacctgctgctacctgtttcttgcctctgtccaccctgaggaaagcccacagaggctcctgcaccgtatcgcactcttcacatccgtgcacacgcacccacataacccccgcggcattcccacagactccccagcgccactgctgccttcagatccctcccctccggaggcctccgcaaccctcctcacctgcccaggctccccccagcaagagcaggaacatccacgtcttggccgcacgaggtcgggggcgtcccatggtgaggtctgggaaatggagagggcggggccggtaaacaggaaggaggagcctgagctcccagttctggatttgggcactggggaggcagccgagagtatctggggctgttctgggcttctctggaggaaggaggaggctgggggactggattcctacattccaagggaggggggagtcctcgatgtctgggtctgaggggacagggagctgggagctgggactcctaaattagggagaggaggaagccggggtccagactgctggatctcgacagagaagggcatctgaggctggggtcctggaatctggagaaggagggtccggggcctgatgtctgtatctgagtacctctgcacctcaccttccagaatccaggggcggggtcacctactgattcggacccagtggaggaggccccagtacttcagttctctgcctggtacacgattctggagccttttaactgggaatctccacctcctgctcctcctccttctcctcctgcactagagcctggggagcttctgggaactggaacactgggtgtgagtgagaaggggcggaggggattgaacgtgaaatcttgagggaggaggggctggaatctcagactcctgaggctagggagaggagggactcggtgctgagactctacgatctgaaacataaagggctgggggccaagattttagttctgagaggggaggaggctgggggcctggattcctgggtctgagggaggagaggctgggggcctggactcctaaatctaagggaggagggactgggacctgggatttaggtctgaccgaggaggggctgggggcccagactcctgggtctgagggaggagggggctgctaggggccaggactcctgggtctgagggaggaggggctaggggcctggattcctgggtgtgagggaggagagagctgggggctgaattctaagtacttttaaaaggagaagcttggaacctgatcttttgtgggaggagggggctgctgccagtaaccgggaaccgaagaaaggcaggtcttctagggtcagaaaccagagggtggatcaggccccgcccgctgtcccctgagaggtccgggatctgggagggcaggtttgggaggcactgtgacctggtttccccttcccctggaggcggcaagaccaacccaagcagaacccaggagtcttgctgcaatagggctgatggacagagactttaggcaaaacttactaggggtttaagggggagttgcaaggcggtaccggttccctcatctgcccttcaccgcccacccgtttgctctccactcatctcacagctcaggcagaaagaaggtgaggtttcccgcgtttactgaaaaatcatccgttgcattggctctaaaggtatccagaccctccctcaatttccccccaggtctccgccaggattcaaacccagcacacgcccaggacggggccacaaggggctgagctctacaccgcccgagctccacgtgggcggagctactgcgcccctgacatcacgaggggcgagatctctggtgaaggaggcggggccacaaggggtggagtcccgaggggaagtcccactgggcaaagttccgaggggcggagctattttgtgtaagtggttccttggggcggagccacaggctgtgctgttccaagaaggaggtgatggctgtcggtgacgtcatagagacgggctctgaagggcgtgtccctgctccgttccgagggggcgcgactgtgtcttgcttgacctcgtgagggggcggagcctcaggggcggagtcttagtgtccagaggggagtcagggcagctggaggtccagggcgggaaccattgaggctgggaccctacgagaaccccctaccccgtgcccttcggcctctcttggtcttccaaggtgcccccgtggcgcgcgggctcagttctccatgatttcttggatccagtcaaggtagtggcatacgctggtgtagactgcggggcgccggggtctggagcagggctcagcacccccagacaccacgcctgccaaggttccattgcaaaccagggggcccccagagtcaccctgtacgcgagagaagggcagaggaactgttaggccactctgttcatgacaattacacgggccacttcctccctcccagaaaggccccagccccttcctcctccaacatccgagagtcctccatctccagcctcttcttcctcagacccaggagtaaaagctcagagggcccacctccccgcaggacctaacctcctcctccccgaggactcagactctggacgcccagcccactcctcctgtagatccagaagtctggacctccagaccttttctcttttacactaaggagtccaggccctggtcccgtcctctcccaggaaccaggtatcccagtctccttctcattttgacccaggaaggctgggggccgacccctctgctcccctaaatcctagaaaacttggcaggacagcctcattttccccagagtaaggtctcacctggcaggaacctcggcccccctcccacaggcccgcacagagcatgctgtccgagatgtgtccagggtatgcccagtgacagagtttgttctccaggatgctgatgttggcacactgcagtgtgactggaaacagcgctgtcagggaagagaactgtcaaggatctgcaactgtctccaacacactcagcaccccactgccctgagtcctccctgcagcttttccaaaggaccaatggagccacatttaggactctcaaagatagagacaagagacagtgacagacagacagtcatagcacacaagagaaacaaatggagacaaggaggaagagggccaagtagagagagaggctggccgggcaccgtggctcatgcctgtaatcccagtgttttggaggccgaggccggcggatcgcttgaggtcaggagtttgagaccagcccagccaacatggtgaaaccccatctctgctaaatatacaaaaattagccaggcatggtggcaggcgcctgtaatcccagctactcgggaggctgaggcacgagaatcacttgaacctgggaggtggaggttgcagtgagccgagactggtcactgcactccagcctgggagacagagcaagactccgtctcaaaaaaaaaaaaaaaaaaaaaaaaaaaaaaaaaaaaaagaaaggaaggaagagaaacagaaagatgcatgcagagagccaagagataagaggagatgcatatataactccctagcactttgggaggctgaggcgggcggatcacaaggtcaagagattgagaccatcctggccaacatggtgaaactccgtctctactgaaaatacaaaaaatcagctgggcatgctgttgcacacctgtagtcccagctactcgggaggctgaggcaggaggatcacttaaaacccaggaggtggaggttgcagtgagccgagatcacaccactgcactccagcctgggcaacaagagcaagactcagtctcttaaaaaaaaaaaaaaaagaaatagaaaaagacccagacctcaaggggtggaatgaaggcagtgagataaaaggaaagagatttgcaggaagatggtcactgatggagacagagacatagacagagataccagatacagtgtagtcagtatagatgtggatatggatatataatacacatgtgcatctatataagacatgggtgcaggctccgatgcatcaagggatatgataaacagaattggtaaacagaagtcggggacgggggctgtgcagggagacaggagccatttgggtccattggagtgaatcagagaacttatcttggctgaagggggcagcctccattgactcagcccaatgcttgctattttgggaatgtgagttcttcaaactttttcaggtgaatccagaaacctggcttttgtataaaactttccaagttttagatattggcagcaacaaattcagactgtttttccaatccactgacccaatttggctaatgggtcagtgatccgtgactctgagagacatggtcttattcccattctaagatgaacgcatttcacatttaaacatctctgggccaggtacagtggctcacacttgtaatctcagcactttgggaggccaggagtttgagactagcctggacaacatagcaagacctcatctttgctaaaaataataaaaatttttagcataaggcttaagttaaaggaggtcccatcatggagcaatgcatgatgggaaattcccacccagcatcttttaccagaatcagtgctttattcatggagggaagaaaattggaacagtatggatggtcacttttcagaggcaatggagagaggattcctgcatcaggtggattccaggatactattagaatgcccagaatctaagattctagaattctcagattctgacacactagtatccatgattctagaatctagaggctcaacgtttagagttttatgaatccaagattctaacattccagattcccctggatcaaaaaactccaggattctaacattatctgaattaaatctaagatatgactagatttaaaaaagactagaattttggctgggtgcagtggctcatgcctgttttcccagcactttgggagtccaaggcgggcagatcaccaggtcaggaatttgagaccagcctggccaatatggtgaaacctctgtctctactaaaaatacaaaaaaaaagataataataataataataataaataataaaaaaatgaccccggtgtgggatgtggtggtgcatatctgtaatcccagctacttgggaggttgaggcgagaggatcacttgagcccaggagttcaaagctgcaatgagccgtgatcacaccgctgcactccagcctgagcaacaaagcgagaccctgtctcaaaaacaaacaaacaaacaaacaaacaaacactctgaaattagaatgtgtcttccagaaaatggtgttatataatcaatgggatctaatgggatctttcctcctcctcctttttttcttctcctcctcctccttcttccacttcttcgcagttcatgaaataatggcacatcttaaaaatgctagcatcttatatttggttaaatatatcgattggcagatagatagactgacagagagagagaggagagagaaaaggagaagacagagatgaaaaggcagagacagaggggtgagggagcaagtttcagagagagttctgggccaggtcatacccttggggctggacacggccccccagcctgagatgagacactgcatgcctggggagacacaggtctggctgaggttgaggggctgcacagcaggactcagacgtgcctgcctgggcaggcggatcagcatgatgtcatcattgtggtcattggcgctgaggtccttgttgaagccagggtgggggaagaagtccgtaacccggaacagctgctccggaccctcccatttccagaggtggtgctctccaaggcggacccacagatacctgctgggacaggcctcagaggtcaagctgggggaaaggtaaaagtcctttcagccccagccctcttttcctgtccatcagggtgctgtgtgaccctctgcaagccacacaccctctctgcaccctcatcatctatgtctggcccagggtactgtgattttaagcgaggcacacacctcctctgggtccctggtccccactctgatgttttgtgtgtctccatctttgtagctctccccacaaagcccccgctcctagtcccaggctgagtgagccaccttcctccctactcacctggagccttggtggtgacttgggtccctaggaacggtgtgggcacgggggaccccacctaccacataacaaccgccccacccctgcccccacaggtctggtggcttctgtgggagcggctctgtatgtctaagtggtgtgtgtgtatacgtgtgcgtgtgtatgaaaggggatgggatatggaaaatccccaaattgggggtcatctctggcctcagcttttcctgtctatcatatccttcacccttcaatgcatgtcttcctggtgtctaaccttaagccctcaccacagtctcagcgcacttgtttcatttctggtccatgccctagacagctgggatcctttcggggatgacaagtccattccccagcctctgacctctgacattaggcagcaggctaatgactgcgaattcagggttggggaaccagaaacatctgtgtctgtctctctctgtcattcttgctgtcttggctctggatctggaaaagtagtcctcacccctacatcccttcatccccctacccttcccctgcctctcactctcttccaccttcatatctctgcatttctcctgcttcactttcggctgaaatctgaacatcgttctcccagtctgatgtataggcttaagttaaaggaggttccatcatggagcaatgcatgatgggaaattcccacacagcatctcttaccacaatcagtgctttactcatggagggaagaaaattggaacagtatggatggtcacttttcagaggcaatggagagaggattcctgcatcaggtggattccaggatactattagaatgcccagaacctaagattctagaattctcagattccgacacactattatccatgattctagaatctagaggctcaaggtttagagttttatgaatccaagattctaacattccagattcccctggatcaaaaaaactccaggattctaacattatctgaattaaatctaagatttgaacatagaattttaatgttctaggacaaaaagactagaattttggctgggcgcggtggctcacgcctgtaatcccagcactttgggaggccgaggcgggcagatcacaaggtcaggagttcaagaccagcctggccaatatggtgaaacccccgtctctactaaaaaaaaaaaaaaaaaaaaaatagcctggcatggtggtgcatacctgtaatcccagctactcaggaggctgaggcaggagaattgcttgaacccgagaggcagaggttgcagtgagctgagattgtgccactgcactccagcctgggagatagagggagactctgtctcaaaaaaaaaaaaaaaaaaaaaaaagaaagactagaatgtcatcattctataaatctataaccttagaaatttaagagtctgggattcaaatagtttaagactacagaattatctgaatctcaatattctaggatactgtgaatcaaagattctagtactgtgagtttcaatattcaatgaatctagaaagctctgaatttaagattctaggatcacactagccattatggctattgaacacttgaaatgtggctagtccattttgtaacaggctatgtgtgtaaaatacagaacagatttcaaaggcttagtaccaaaacaaaagtaaactgtatcgttcatacgtatttaaaaattgattacatgtcaaaataagtttttgggtatgtcaagttaaatctattagaattaattttactcattccttattttttaaatgtgtccaccagaaatttaaacttacacatgtggctggcatcataattcctctgggcagtgctgacccagactgctaagattctaatagtctgcgaatctatgattctaaaatttgctgaggctattgcagaatttcataaattcaagattttaggattctacgattctggatttctctgggtcagtctcggattcgaagagcctaagtttcgaatcttagacttctcaaatgagatattgctggtctctagaattttaggatttgggaggctacccttcctacttctaagagttgaacttgtggtatcagaagtggaggctccgcacttctggcctaaagcacccctcaccctctcctgacccccagcctctgtccctccccagcatggccagcctgggtcactcacggcttgcggcagtgggcagctgtgagcagccagcggtcactgatgagggtcgccccacagaagagccgagtaaggtggaagaggccggcctgccaaggctgggagttggggcgacattcctcggccccgatggcacgggtgtctgcccagccatgccctggggtggggatgagggacaaaggggtcagcgaagagcaggctgggagggcagggagaggatgctgagaagcctagagggcaggaggcagaagcctgggatgggagggaagagcaaggtgaccttagtacagccgtgaaggggcagccagcctgggagcctcacctgccagcagagagagcagagcacagaggagtcccagcttcatgacccctgggcacctggatcctggaacgtgcacccggcgtccagtgcttctttatggtaagccatgccatctccttcctcctccatggggccgcccctgtgattaatcggggttgggaaatgtacctgggggagggggaagccctggggctgtgacaggggccttgggagaggaggtaagtgcagggggaccccccttttgggatgaactggcggcttgctgggccagagcttgactgaatggaggaggagtgctgggggtgtggagaggttgtgggcacctcctctggggtcttcagagtgggagacctcattcctcatcaccttaggctacaagatacagaatcttttgtgtcctggaaaaggagggagatccttgaagcctaaggtcctggggtgcagcaggtttattttggataaagcagtggtgtgcagagaccaacctcccacggcaggctggagggatgtgcagggggaccacccagaaaggaggcgaggggtggaagacagagtcaggactcagacacaagagcaaaagatacaaagagagggaggtacaggcacagaaggacccaagatgagaggaggagtgggaggaggagacagaacacgggaaagattgagggaaatccaggtggagtgaggcagagaccacaggcagctgcacaggtttacacaccttgcagaaccttccctgccctggggatttgggcctcttcccacaaggacaaggccctctcctagaatgttgagaaatctggttccatctggattaacccactcttgtcataacctgcccccttccccacggctccaccacccaaggacccaggtgcccaaccttccaggtagcaagtgccctgtgctctctcttaatacatcctgatctttgccaaatcctgagaacatttgctatatatttttttcatccatctccctgccccccaccccattgtcccttccatcaccccatcctccctgcctctctcctcatcattccttctcaccaggtggacagcttctggagggctgggcccaggtctgactcatctctgtgtcccagcatcaccccgttccaggcggaacagggcttgcagaagtcctcaggagatgttcattgaatgagtgaatgtctttctccatatccttcttttcctggtgaactcccactcatccttcaacacccaacctcaattctccctcctccaggaaatctctgagatcctcaggcagagtccatctttgcctcccctgggcacttacgatcccttccactttctcctgctcacaggcctggttatgaagctgggtctgggctccccttgaatgttctctcactgtgtcgtcatggtttggagcatggactctggaactgaaccatgtgtgtccaaatctcaatgattaggtgtgattagtgatgaggtgtgtgactttgggcaagtcacaagacctctctcagttgctccatctgttttttgtttgtttgtttgtttgtttgttttccaaaacggagtattgctctgacacccaggctgaagtacagtggcgcgatctcagctcactgcaacctctgcctcctgggttcaagcaattctcctgcctcgacctcccaagtagctgggactaaaggcgtgcgccaagacacctggctaatttctgtacttttagtagagacggggtttcaccatgttggccagtctggtctccaactcttgacttcgtgatccgcctgcctcagcctcccaaagtgctgggattacaggcgtgagccaccgcacctggcctgctccatctgttaagtagcagtaataacgagggtcgttggggggattaagcaaatttacacacatgaagcacaacagtgtctgacacatggtaaatgttcaatgtctcttcatcccctgcagaaacctgtggtgcctttatcatagctcatttcacccttgcctgcagttgtctcactccctttccagacagggaagtccttgagatcagggactgggtatccactatgtgctaagtgccaccttaactgctattaagagcattttagaccaagcgcggtggctcacgcctgtaatctcagcactttgggggaccgaggtgggtggatcacttgaggtcaggagttcaagaccagcctggccaacatggtgaaactctgactctattaaaaacacaaaaattagccaggcatggtggcgggcggcctgtaatcccagctactcgggaggctgaggcaggagaattgcttgaacccgggaggcagaggttgcagtgagcctagatcgtgccactgcactccagcctgggcaacagagcaagactctcaaaagaaaaataaaaaaaaaatgagcattttaatagctacctttattgactgtgttctcagtgcctggtgttaggtgaactttgcatgtatattatctcatttaattatccttttgttgttgttgttttttgttttttgacacagggtctctgttgccaaggctggagtgcagcggcatgatcatagttcattgcagcctcaacctcctggactcaagtattcctcctgcctcagcctcctgagtagctaggactacaaggtgtgcaccaccatgcaaggctaattttttttttttttttttttttttttttagtagagacgaggtttcactatgttgctcaggctgatcttaaactcctgagctcaagcattccacccatctcagcctcctaaagttctgggattataggagtgagccactgcgcccagcctatctcatttaactctcacgggagtctaattaagcaggtgtctccatttcacagagtgaaaactgaggaagagacagcattcaagtaatttgctcaaagtcatacagcaaagtgattgaaatgcatttccttctctacctggtgaactcctacttatcctttaaactcctgcacaaatgtcccctcattgagaagcctttcctgactccttcaggcacagcctgtggacttggtgtggtgcaccccatacccccttctgttacagcactgatctatttgtgttatgtgttcacacagcaacgggggtgacttctgtgtgccgggcacaatacaggagcttagaaaatcacagtgaacaaatatctgaatcactgccctcacggaatttgtggggaagggtgacatagaccattatcaagtaaacacaaatgagataatttcaggtataataggtgctattaaaaaaaaaaacaaacaaacaaaaaacagagcatcgggactggatgaccaaaagtggactcctatagcctgggcaattcaggaaggcctcccggaggaggtgacttttgagtggagacctgaatgacaggaatgtaagactggcctgtctccctgacctaactagcagctccttgagggtagtgcctggtctgattcatctttgaggcctggcataagacgtggctcgataaacattgtggagtgactaaagggacgggtgagttgcctttaataatgaatcgagttttcaagtttccaccgacctcgcttctggtctttggatgacaaacccagctgatacgcctgtctgacatttcctgcgtgtgctaatgggggcagaatgggaaagaggccacggaagggagctgtgtgctcagaccttgtacatcaacctcctgtgggctctgcagggtgggggaccttgtgatcacccctacgtatgtccccagcacccagcactgggcctggcacataatagatgctccataaattggtaactgaaaggacaaacaaacaaacaaaaaccccgtgcttaatgggaaatttctgttgtgcctatattcagctagcttatgttactgcttcaaagttcaggataagctgagacactcaaacttcttctttttttgagatggagttttgctcttttgtccaggctggatggagtgcaatggtgcaatcttggctcactgcaacctctgccccccgggttcaagtgattcttctgcctcagcctcccaagtagatgggattataggtgcctgccaccatgcctggctagtttttgtattttcagtagagatgggatttcaccattttggccagactggtctcgaacacctgacctcagatgatctgctttcctcggcctcccaaagtgctaggattacaggcgtgagccaccacacccagcggacactgaagcttctattagccttacctggattctgtgtattaactccccttccctcccccaatttcagggagaatcaaacaattcctcctcccaagttttcaggacgaaaatctcacagccaattaataacagacaaaccaaagattttcccctaaatgtcagagggaggtttcttggcacaagctgggcagttgaggtggcaagggtttcccaatcttcactaccccctcggccctctggtcttagaggctgggatagaagcaaggtgaggtcccttgagttcagtggcctcatgaaggcagagaaggtgctaatgactcagggccagcctagctcggaggaactggtgttgggtggaaccagaagtgggaaacagtgggagatgagaaggaagtggttaaaaggtgtttcctgggacttggaactagggtgaggaaaatgattcttccatcatccctaagggttggggatggaaggttgggactgggggctaccctgtgcacttcttccctggacacacgctttcaccgggacgtggtcagatcacgacaacaggtaacctttagtcagaactcaccacccactgtgttaagccttacatgacaatcaccatgaagatttacatacacatgttatatcatagtctcctcacaacatgtctaagaggtaggcacgtcattgttcccattttgcagatgaggaaactgaggttcagagagggcacttggcttgcccaaagtcacacagcagggagtggcagaggaagtcaggttgggtgaccccagtaactgctctcagaggctgggtgatgaccggcttcctggcttctctggaataaacctttgccaccacttcctgcatttcagcttcagtacaggcagagaatggggataggtgggggaatgaggtgagaggggagatgtttagaggtgtggagggcggcagaggtttgaacagtgcagacaaggggagagttcagccgactggggaggaagaggatggacgatggagcctctgggcatctggatcagcaggagcataacatctggatcagctggagcgtagcatctggatcagttggagcgtatgactttattgatccaggacatgtatttgcagatctgggtgtagacagctggatgctgggcagagccacaggggtaaacaccccacgagaggatgccttggagggtctcgtcacagaccagggggcctccagagtcactctgggggtggcaggaaggagagatcaaataaatgtgccaacgtgagagctgtcactttgggatctggggcagtggtggggaaggaaggagttgggttgggataaagacgaggatgggatggggttggaattaggtatgagctggaaggtaggaatggaggtggacttcaggttatgggaggttgggctgggggatgagaatgaaggcacagtgagactggggttgggattgtagttcatggaaggtgaggggatgaaaatgggcttggagatgggaatggggtggggttgggatggaaatgggattgaggatagggatgaggagggggttaggtctgggtaagagttggggtcaaggatgggtttgggaatggagttggggatcgggcacagggtctgctcttttcccataacctccctgtcctccctcccaggagtcagagactctccctgttcagaccctacctggcaagggtcctggccccggtccagtccagcacatatcatgttgttggtgaccacgccagggtagaagacctcacactctttagggctcaggatagtgatgctggagcaggtcaggcccttgttgtacttcactgaagggagaatatgccagtaatccctgggtccagcccccaatccttggggagccaggagtccagatacaagaccgtttctatcctaagccccagcccctcctccttcagactcaagaatcctggccccagcccctccccacttagacccaggagtccaggcccccagcccctcctcccctcagactcacagacccaggcatctaggaccccagcccgtcctccctcagatccaggaatccagtccccagcccatccttcctcagacccaggggttcaggccctcagccccctcctcctgaggttccggcctcagagccccagctcttgcctctccgggcggccgtggtgccccagccagcaacctggcactggtctccgggctgagcacagcggtagggaagctgcagggcccggacgcggggccccagcactacgggcctggccagcttcagcaacatgagatcgtgctcatccgttcgccttggcaggatggggcctgagccctggtggtacttgggatggacaacagagcgagtggtccggcggagctgctctccctgaagaagcagcaggtggtcatcccctactcgagcccacagtggcctgggggaaggaagaggcatgtgaaggcaaacccttcatagggactgggaaagcaggtgggcagtgacgcagggcctggagataggaagagtctgagggaagagggccttgtgggagaaggggacctcagtggacatggggaggaggaatcagttgtttgagctctgaggatctgtaggaattgaggagggctgggggcctggacacctaggtaagccttccacattttcttttctctttttcttttctttgttgaaacagagtttcgctcttgtcacccaggctagaatgcaatggcgcaatctcggctcactgcaacctccacctcccaggttcaagcagttctcctgcctcagcctccttcctgagtagctgggattacaggcacccaccaccacacccagcctttttttttttttaatttttttaaaattttttattttttattttattttatttttagttgagaagtggtttcaccatgttggccaggctggtcttgaactcctgacctcaggtgatccacccgccttggcctcccaaagtgctgggattacaggcgtgagccaccgagcccagcccaactccacattttctctgtggtaatacccaacccttcctccttcaacggggactcacgaagtgaaccttttcctttagttctaaattcctgaccacaccggaccctggcttctatccgttgcaggcaaccacctcctcctagagctcaaggagaatcagcgggagaggagtgacgggcccagaaatgcggaaaaggaccacaccgccccctggcggccacagcgcaagcccggtctctcctcctgctggaaggacaccggggaccgcacctccagctgtgggagttccgagagaccccgccctgcccgctcctccctggaggccgcctccacagccccccgtggcgtcctcggggatggatctcctcctacttgtttccgcagtgcgcggccgtcagcacccaactctggtccaccaggacacccgcgcagtggaacgagaggccgttgaagagcgagacctgccagggctgcgagccgcgcgcgcacggggagccataggcttcggggtccaagcgcgtgtcgttttgggggagcagcgccgcctctgcggctggagaaagaaaggggacggaatcaaagcacggagggcagggtctgggtttggggttggagctgggctgtggcactggactgcgttcggggacgggggacgcagccagaacgcgagggtggtagggaaatattgggggtttcgcgtgcaccgaagggaatgggaggagaagaagcgcgtgaaagtggaaggaagctgggatagggtagcgtggagtaatgagacagaatagggtgggtctggagggcagggactgaacgcagcgcgcctggagagctggctagaacgtcgctggtcgatagaggggcggggattgaacgcggcggggaggtaagggtgcggggatagaactcggggatcggggagaggaaggggtgtgaataacaaaacgggattgaaaaccaggagaggggtggggcgcagtggtttacgcctgtaatcccagcactttgggaagccgaggcggttggaccgcttgagctcgggaattcaagaccagcccgggcaacacagcaagacccagtctctacaaaaacaaacaaacaacaacaacaacaacaaaaaagtagtcgcggaggcatgcgcctgtagtcacagctacctgggaggctgaggtgggaggatcgcttgagcccaggaggtggaggttgcaatgagccgagattgggccactgcactccagtctgggcgacagagtgagaccctgtctcaaaaaaaaaaaaaaaaaaaaaaaaagccggatgtggtggtgcatgcctgtggtaccagctactctggaggctgagtatcgcttgagcccaggaggtcgaggctgcagtgagctctgattgggccactgtactccagccacggagacagagcactgccctgtctcaaaaaaaaaaaaaaaaaaaaaagaaggaaagaaaaagagagagaaagaaaaaaacaagaaagaaagaagaaaaaataagagagaaagtaaaacaagaaagaagaaacaaacgaaaggaaggaaggaaaggaaggaaggaaaagaagaacgaaagaaagaaaagaaagaaagaaaaagaaaaaagagagagaaagggaaagaggaagaaaaaaagtgaggggagagggcaaaaagcggtaaggcaagactcaggataaaacacggtggtgtggccgggagcggtggctcacgcttgtaatcccagcactttgggaggccgaggcaggcggatcacgaggccaggagatcgagaccacggtgaaatcccatctctactaaaaatacaaaaaactagccgggcttggtggcgggcgcctgtagtcccagctactcgggaggctgaggcaggagaatggtgtgaacccgggaggcggagcttgcagtgagccgagatcgcgtcactgcactccagcctgggcgacagagcgagactccgtctcaaacaaacaaacaaacaaaacaaaacacggtagtgtaaaatggagcggggccgggatggggcggcgtaagaggaggagaaagaacgcggcgaagagtccacggaagagcgaggatccgggtggcagaaatcggacagggcctgagtggggcgggtcacccaggggccgagccagaagaagggcccagctgacttgggggcgggccgtgctccggagcgctgggtgggtgctggggtctcgggggaggagaggtgcgcggggcttggtgacgggaacacattctcctcccgcccgtgcctcccaccggcgcctctccccgccccctgcccccgaccttaccccagagttgcgccatcagcagcggcagcagcttcgccagagcccgggcgccagaggcggcggagaggtggaggtgcggagctctcatggccaggatctgctggggtgtgtgcaggggcgggttaaaacagatgctccgttagagacccccacctcgccgcgctcatccgcccagcctgggccaccccagcccgcaagcacccttttgacctgcagccgataaccccaggggctggcagacgggagattcgggctggaacagcggtaatgggcacaattaccctaatgacgcccctcgcggcatcttcccgtcctccctgtgcccgagtggagcgctctccgcgccccagctaccctggctgcagccacgccgcgcccgaggtttccccctccttcacgcgcggggtggggatccgaggctcggagccagtgggagcctctttctcaacctcacagcggggggacttccgcgtcccgcaggtggagaaaccgaggctctaagccggctcctgcctgtggcccgggggtccccacccatcctctcgcaatccaccccaacccgggtggggtgcaggtagcttcacctgggagtcgccgataggaaggagggaggggacccagacgtgcctctgccctgcctgtggtctgccgctggtatcctctgcccagggacccctggcgggaccttcccttttaaccccaaggagtccggaagcttctccaccctcccctacccccacccccgggctccctccctttccctctgtctaattgtaccgtgggtgaggctggcactcctgggtcccagattcctgctctgggaggggccctggaatacaggcttctcccagtgcccgaaacgcccccttttcatcccttttggaactggcttccgtggggattctccgggtcccggtgccaagaaggcttcccaggcgcggggagagggttcacgtccccagcaaggctaggggtggcaggatgagaggccactgagcaagaggaaatcaatgggaagtgcatacctagagtgacaatgtgagaagccagactgtggaagaggaaggaggaaggcctagagataaagcaggttgagtaggagggacagaggctggcttgaaaagggagattgtaacaaaccaaggctaaaagagccagagagagagagagagagagagagagagagagagagagggagggagggaggcgccgaggctaagagaaacagaaacaaggaaaaagggaaacccacgcccactctgtggccgtgagtgagctctgtgtgtgtcccagtgactagcccatgtgcgtgttggggggggctgtggctctgcctcatacccatgtgtggccatctcacaccctccctgccatctgtgtgccaccaggtgacacacaggcccctgaatcataggaggtcaaagctgtgaggggcatcggcatcacctcagccaactccctcatctcaggtgaggagtgagaggctcagagagggcagagactcacaggaggtcacacagcaagtccacttgacaaccagaaggccctggttccactctgggctcctattgctcatgccagccacttctgcgaggtgaacagaccatcccaaaagatcctgagctggccgggcgcggtggctcacgcctgtaatcccagcactttgggaggccaagggggggcggatcacgaggtcaggagttcgagaccagcctggccaacatagtgaaaccccatctctactaaaaagacacaaaaattagctggggatgttggcacaggcctgtagtcccagctactagggaggctgaggcaggagaattgcttgaacctgggaggcagaagttgcagtgagccgagatcacgccactgcactccagcctgggtgacagagcaagactctgtcgcaaagaaaaaaaaaaaaaaagatcctgagttctggattctctccgtgggacatcctcttcagaggccatctaactcagtgctgctcagctgaactttctgcagtgatgttttatatgcactagctaatccagccaccaccagtcacatgtggctatccagccttggagatataacaagtgagacagaggagttacatttctggctttatgtaattttaattggaagagccagctgcggttagtggctaccatattggccagcagaggtctccactatctaattacctatcatggaagttggagaaaaacaataagctcctttggttaggtcttagtatgtgcaggctaactgacttctttacttactgtgttatacttttgcatgcagcattttacaggaaaggaaacaaacagagccttactccaggaacatcacttggtaattaagagatcgccttgcttcagatccttgctctcctagccacgtgactgtgagcaagtgactttgcttctctgtgtctgtttcttcaactataaaataggtatgaaaacagtaccgacctcacagggttttgtgaggattaagttgatacatttgaaagtgcttggaggccaggcacagcgactcatgcctgtaatctcaccacttttggaggctgaggaggacagactgcttgagcccaggagtttgagactagccggggcaacatactgagacctctgtctctacgaaaaatacaaaaattagctgggcttcgtggcatgtgcctgtagtcccagctactctggaggctgagggaggacaatcacttgaccccaggaaattgagattgccgtgagctgtgattgttactgcactccagcctgggcaacagagcaagactgtctcctaaatagattaattaatttaatttcttttaattaataaatgaaagccgggcgggcgcggtggctcacgtctgtaatcccaggagtttgggaggccaaggagggcagatcatctgaggtcaggagttcgagaccagcctggccaacatggtgaagccccatctctactaaaaaatacaaaaattagccggatgtggtggtaggcacctgtaatcccagctattcaggaggctgaggcaggagaattgcttgaacccaggaggtggaggttgcagtgagcagagatagcaccactgtactccagcctgggtgacagagcgagactctgtcaaaaaataaaataaaataaaagccattggatcagggtctagcacatagtaagcactcagtagattcactcatttagcaaatatttattgaaaccttgatatatggccaggagctgtctttggggctggggatacaacagagaacaaaccaggtgttgtcattcccagagtcacaatatttcaaggcagaatttgaatccaggtctcactgatttcgaaccccaggttgattattaagtgacagcatctcctgtagtccaggaggcccaaagaatgttcgtagagggtcttggcttagggtttcttattaacagagtgaacaggaaccaaacaccaagtggaaatggagggtgatgggctgtggtgggtgggtccagtctaattgttcttcatcgtctcctggatccagtccacatatttgcagactttcgtgtagacaccaggctttcgggtgatcgcacacggatcctggccccaggagataatgccttgaagagactggttacagaccagagggcccccggagtcaccctgggcacggggagagagaatgtcggtcagagaaagcgttgagcatggtgttagccagggaggaggtggggacggtgcttaggagtggggccgagacaggatgggtaggcactgggaaaggtgataggtttagcgataaagctgggattatgggtgggataaaggatggggttaggctcaaaaacgagtttggggatggttggagctggaaatggtgtggaaacggggatggagctgaagtttgtgctgaggtcagaaacgggaacaggggaagagatggattgggagttgcaggggtcggcgggttgaggttggggatgaaattgtggatgtcggtaaagatgtcattgaagctggggatggggatggggctgtggttggagaccacactgacctggcaggagtccttgcccccttcctgcacgctggcacacaccatggtgtctgtgatgttgccggggtaggcgttctcacacttctggtgctcaatgatggtgatgttggcgcatcgcaaggtgtgaggcaggcgtactgtggaaacagcgtgaggggctgtgggaatgagccccctgccacctcccctaatgcagtgcttgctgtgatcccgcccctgggggaatccctgtccttagacgcagccaactcacctctcttcttgtaacaatagcaacagcaatgctatccagctttttttttttttttttcgagacagagtcttgctctgttgcccaggctggagtgcagtggcgtgatcttggctcactgcaacctccgtctcccaagtttaagcgattctcctgcctcaacctcccgagtagctgggattacaggcgcacacaaccacgcccaactaattttcacatttttagtagagatgggatttcaccacgttggccaggctggtatcaaagtcctgacctcaggtgatcttcccacctcggcctcccaaagtgctgggattacaggcgtgagccacggtgcccagcctgctatccaataaatgatttatgtcagttgcttgatatacattatctctaatccaatcctgacaggtgggtataatcattctcattttatagagaagaaaatcaagattcagagaggtgaagctgcttgcctaaggtcttacaaccaggaggttatggatgtatgattgcatatcccgtccgtctgactccaaggccccaacttttgtccccacccccctatcctgacgttttccacacatcctctcaacttatcccacatcgtcactgtgaaccgcatctctgatgccctgaacccttccacaatcctgaccactccctcctcaccaccccctgccaggttcccctctggtgctcctacactgggggctggacgtgctgccccagccggaaatgaggcagctggtgccagcagtgacacagcgtgaggagagggtgaggggtcgcacagcccaggtgatggagactggcgatgccatcttcaccagcatgatgtcattgcggtggtctttgttggggaggctgttgttgaagccggggtgggggaaggactcagtggctgtccgggtctgctcacagccctcctccttctggaggttgtgctgccccaggtgaactatgtagcggctgaggtgggagagacagtagttggaggaggaaaggtcgggggagacatgggtgggagaggtgagtgacacctttgaggatgaagaaacatcgctctgcttccaacctcttccacgtctcccaccgaagcccccttcccagccatagccccatcccaaccccattcatccccccaccttcaataccaactcgagcccatcaaccttgctgacactacccatccccatctctaatccccttaccagcacccctatccctgagcttctctccatccatctccccattcccagccccccaccccggcaccgccccagcccccgcacccacggcttgaggcagtgggctgctgtcaggagccatctgggggcgatgagcgtcgccccacagagtagccgcgtcttctcgaacagggctgcctgccagggctgggagtgaggcttgcactcgaaccccttgatgatcctggtctctccccctacaagccctggagggggtgagagcaaaagaaggggctcaggaaggagaggtggtagaccaggaggactcccagaaatgggggtggggaggagagaaagagagtgggtggtctgggccctggtctggtgtccctctgggttgccctggatgctggggtcgggtattaaaggatgaaaatacttccataaggtcaaatgcagtggctcatgcctgtaatcccagcactttgagaggctaaggtgggaggattacttgagcccaggagttctagatcagcctaggcaaacatagtgagacctcctcccccatctctacaaacaattaaacaattagcctggcttggtggcaggtgcctgtggtcccagctaccggggaagctgagatggcttaaggatcacttaagcccgggaagtcaagactgcagtgagccgtgttggcaccacggcactccagcctggacaatagagcaagactttgtctctgggaaaaaaaaaaaaggaaatacttccatactggttggtcagtagcccctgtcctgggcgctttgagtgactgctcccccaactccagcttcctcagcccctccacgggaccctttacgacccccttgacctctcctcctttggcatttaaagggattatctagaagggcatccaggccctcatgaccactgctccagttcaggtgccttatgggttgttctgtaatttggaatcagccctgtcactgtccagacacagagggttaggggatcccagagattcaagagggaggatcctgccctgcccccatcccctgcgtacctgttgccagagcaagcaggattaactgcagaatcctcatggcctggaggggggaggagcgggccccaggttcctctgggaacaaggagggacatggggccgcatcactttacggggaaatcgggaggggggggctggctcatgccctctcctctctccctcacctgctcccgctccccacttgggagaaacaaggttggggaaatcccctgtttctcacagcactcagatctccaaacacttaaaatatatcttaggtgtctagggtggccttggagagggcctggtcacagctagaagcttccgagataccaagaaccatgtggaagtcgttgggaggggctttgagctgtcaagccatggttcggccctgttcaagtcagccatgggacctccccggcacatgtcagaggatgttttccttcttgccttgagagctggccaggccccagcagcttggggtggaaggacaaggggaaccagacaccgttccgtagccacccctttttcattgtcttcgcagcagagcgatatggagcctttgaggtctgctggaggggagtagggggctcagccccagacaatgtctgggacccccatcacccggcttgctgaagccctgtccgccaaacccctgcccttttgaaggacagccaagcaaagctgggcggggctggtcgaggggagggccagtgccctccgctgccctggccagcgggggtgggagcagagggccagctcagcagctgaagccatggagattagaggtaactgaggctgcggacagccatcggaggtgagaggtgtagagagaggccaggaacccccacccaagcagagaaggacagagcagagggagaaatgggtgcccgagtgggacaggtgtccttggggagggctgacacctggacggggaggggcagcttccctttcctcctggactcacaggctctggggctggggctctgggggcccagtggcggcggagacggcagtggcggcagctacagcaggtaggctgggttggagcgccaggtgccaggcaccaggcaggcgggctggcaggggggcggccctgggcgggcccaggatgactggcctccaagccctgccttaatgccccggggcggggtgtgtgtgagggccctccccggaggcctctgaggcactggctgcctgcctgtgccacctctccaagcccctcttctccctgtgtctcagcctccctctgtctgtctgtctgtctgcagccttcctttccctgccctgagtctctgaatctgtgtctcgttctatgtgtcattccctgtcattcagtaattctgactttgtgtgatttttctctttctgtccctatgtgtctgtctgcctttctctgtcctcgtccctgtctccatctccactcttctctctctgtctggctctgtgtggccctttctctaattccttctatctttgtgtctctcagtcagtctctctgactgcatctctggcaatttgtcttgaaatccctcttcttccatctaatctccgtctctctttttcctcccgtcccagccactccctctccacagccccagcccaggtgggcccctggcctcccctaggccgctcccttctcctttgcaaggagagggggggtgtgctgggatgtcacacaggtggggctgctgccaggcacaggggcaggaccggagggtgggggaggcaggtcagggcctgtggaagccgagtccaggaaagggaacagagcccttggctgtgctccaccccagggctcctctggggcctcgctcctctgctgacccttcccctgcccgcttctccctgccgcccaggcagcccgagtccagctgttcacttactggctgctgtgagacctctgcccgatgacttccagtcccgcagccacctcaacctctgcatctgcggaacccgagcgcagattcctgcttctcccagcttgtttgttttcagttaggtcccttcccttggctttcctcccctctctcccctgaccaggtgtggagcaaggcaggggagggcctaggttctgacagcagccagccctggcctcaaacctaggtgcttcctcttcctactactatgactacccttatgacgtggggacaagggactccacccctgcaaggctcagtttcttcatctgagagatgggggtgacagacctgcttgcaggggaggttgggatcaggcttccaggagggtccacttggaaagagcagactgcgggggggctcagcaaatgtgcctccgctggtatgatcacccctcactccctccctcctccagtttcccttcagtgcatttggggagatggtctctcctcacctcttgagtcccagtggagacagaatccaaggggtgggcaggaggattaaagacgtaggctgagctctcctgctttccaagcctgcactccacccttcgtcttattagaacaaagccacgtcccacattaaagatacaatgtatgcttcattacaagaaagtaaactgcagttggctagtggaaagaatgctacgttttatggacattggattaaatggtcataaatgttgactttgcagctttcatctggtattttggagctaacaattttctttttctttttcgggtcttttgtggactcttgaaaagcttataagctctgggcactatttctattatgccagatgaagaaacatgtgtcttatttatattgctgggtttttgtttttgagacaaggtctcactttattgcccaggctggagtgcagtggcatgatctcggctctttgcagcctccacctccccggctcgggtgatcctcccacctcagcttcccaagtagctgggactacaggcacgcaccaccacacccagctaattttttgtgtttttgtagtgacaagatttcactgtgttgccaggctgatctcgaaatctgagctcaagccatcctcccacctcggcctcccaaagtgctgggattacaggcgtgggccactgcacccggcctatattattaaaagtaactttttctactccatttctgagtaactactcagggaagaccctcatcctatttgagcactgggttttttgtttgtttgtttttgagatggagtctcgctctgtcgcccaggctggagtgtaatggttcaatctcggctcgctgcagcctctgcctcacgggttcatgctattctcctgtctcagcctcctgagtagctgggattacaggcatgcgccaccatgcctggctaatttttgcatttttagtagagttggggtttcactatgttgaccaggctggtcccgagttcctgacctcaggtgatccacctgcctcagcttcccaaagtgatgggattacaggtgtgagccactgtgcctggccttatttgagctctgtttctactcctatgagatagggaaactgctgagtccttcttccagtctcaaccagcatgaggacttcaaatggacagacatggcccctccttcatttatatttattccagactattgcacacttctctcaccccgctcgtgggtcttagaagggctggcaggagttaaagttccaagaagttcccaggccaacaagagtggagctaggggaagtgatggaggagatattggtgctctgagggccagaggggtacccaagttaaggggtgggggtggaggtggaggaaacaggtcagttgttcctcatgatcatccggatccagtccacatacttgcaaatataggtgtagactccagggatgccatcttgtccacagggccccacagacccccaggacaccagaccttgaaggactcccccacacaccagggggcccccagaatcaccctggaagggaagagaagtactgtctgaacaagggagacatcttatttctgttttcctccccaacccttcaacccagtcctgggccttggggagggctccaagtctggtcattagacaaaagagtataatcactttcccggaggacaatggcaatggctaaccaaaagagaagaaccactgtctctaggggccaatcccagggaagaagggtggaactccataaaggacagaggttctctcaaggacaatggctggggccctgaccaatgaggagagagagcacagtcattaatgaccaatctcaggggaggctgtcaagacaacataaagagtcgagcattctctcaaggacaatggctggggccctgaccaatgaggagagagaacactattatcaatgaccaatcccaggggaggagggtgggactccataaaggatagaggttctctcaaggacaatgcctggggttctgaccaatgaggggagagagtgccatcaaaaatgaccaatcccagggaaggtgggcaggactccatcaaaagcacagagttctctcaaggacaatggctggggccctgaccaatgaggggagagaccgccatcctcaaatctctctcagtctgggacagcaccaactggaggatggtatgggaaagacttagagccccagaaacagctggttccctgtctgggctcccagtcctctccgtctgttttgctgtctctctctgtaacccctgccccatctttccttctctgttcccttcctccctctctctccctgcccctccccctcctccattccccggtcctcccttttactccctgtctctctccctcccttatcctgggcctctcctccattattattattattattattattattattattaattattttgttttgagacagagtctggctctgtcgcccaggctggagtgcagtggcgtgatctcagctcactgcaacctccgcctcccgggatcaagcgattctcctgcctcagccttccaagtagctggggccacaggcttgcaccaccacccccggctaattctggtatttttagtagattcagagtctcaccgtgttggccaggcttgtcttgaactcctgacctcaagtgatccgcccgcctcggcctcccaaagtgctgggattacaggtgtgagcctccgtaaccagcctctcccttcctttttgaccccgtctctctgcagcatcccctttccctgattcatcctccatcagttcccctcctgcttccagcccctccccttcacttcctgtcctggtgaccacgcacgctgcctgcactggctcacctggcaggcatcctgccccgggacgccgcctgcacacaccatgttgctcgtgattctcccgggatacacaccatggcaggtggcatgggagacgatggagaggttgaggcactggagcagatccgggaatgggtctggagagagaacatgcgtgctgcagggtcccctaaatctccccactttgaggccacgtccctcttccctggatgtggcccatccatgtcaatacccctgcccctcaccgacctgtactacaatcccgaaacctccaagttacatatttatgacttaatttcatatgaatcatgaccccagatgattgacggtctctttgatctttgacatttgactttgagtggcataactcaagaactttcttgtctctccagcgtcagagacaacgaatccagacctgaccctcttcaatgccagctactgtgatctttgaccttctgtcttattaccttatgatcccagcttgatctcatatcttctgtctcctgaccccatgtccctgtctttaccttaacctccaacctcagctctgcatcttccaaacctcactgcttccaacgccagtgtcccctgatcctagtttattgggccccagcctccatgaccccaaacttcgggccccacaccccaaacgctatgacctccaatctcagatatgtgattttggatagaatcccaatttccatcctcagattttgaccagattgtacaacctctggatcccatgaccttaattctacggtgacctctaaccccagacccatgacccacaatgcccatatcctatacatacatatatatatatatatgccttttgctccagtgtgatgacctctgacacactctgacctctgacctctgatccctgacttcatacccagtcctttaacccctttggctcccaagaccccaatccaccataatctctgaccccaaaccatgatcctgatgtcccatcccacaccctgaccctttacccatccttcctctgaggtgtcatgattcgacctctcgccctgcatcccagacttgtacccatcctgacccctgacccctggccctgggccccttactccgtgggtggttggtgatgccccagcctgagacgtggcactcggtgccagcggttgcacagtcattgggcaggggcaggggttgaacgctgctggttacgcggacgggcaggcgcagccgcagcagccggaggtcgtgctcgtggctcgtcgaggctcccaggtagccgggatgggtcacagagaagccgctgtgccggatctgctcggtccagtcgagctggctgaggctgtgttcccccaggcgcacccagtacctgctgccggtggcgacggctgagcgggtggcaggcacgcagtcccccaccttgcacccctccacggacactcaggcgctcctgccgctccccactgttctgcccctcactgtctgtcctctcacccgcaactctcattctccgagtctctcttacaggctcttattcccaacctccatcaccctctttccatcttgggtgttccctgtttctcctaccatgtccctgcatctgtgtctctctctctccttttttttttttttttttttttcaagaccgagtctcgctctgtcgcccaggctggagtgcagtggcaccatcttggctcactacaacctccacctcccaggttcaagcaattcacctgcctcagcctcccaagtagctgggattacagaagcatgccaccatgcccagctaatttttgtatttttagtagagataaggtttcaccatgtgtgtcaggctggtctcaaactcctgacctcaagtgatccgcccgcctcggcctcccaaagtgctgggattacaggtgtgagccaccgcgccaggcctctctttctgattctctcggctggtgaagcccatgaaggcagggacatcagtggaccttgttcactgccttattcccaccgcctggcacggagcatgtgccctccatgctcatgcgtggacgagtgggttcatgattgaacgagtgggttgatgaatggcctctctgcatcctgctgctggccctctctctccctgagtctctgtttctttgcatctgatctcccctttcacaaaaaaagttccaggccaggcacagtggctcatgcctgtaatcccagcactttgggaggtcaaggcaggaagattgcttgagctgaggagtttgagaccagcctgggtaacatagcaaaaccctgtctctacaaaaaaaatttaaaaattagccaggtgtggtggcgcaggcctgtagtcttagctccttgggaggctgaggtgtgaggatcacttgagcccaggtggttgaggctgtagtgagccaagatagcatcactgcactccagcttggatgacagaaagagcaagactctgtctccaaaaaaaaaaaaaaagaaagaaaaagaaaaaaattccagaacatcagtctactgaggcccagagaggtgccaggcatagattctgaagttgcacaaagagtttgggtcatgttggccgggtgcagtggctcacacctgtaatcccagcactttgggaggccaagacgggcaggtcatttgaggccaggagttcgagaccagcctggccaacatggcaaaaccctgtctctacaaaaaatacaaaaattagctgggcatggtggcgggtgcctgtaatcccagctactcaggaggctggggcaggagaatcacttgaacctgggaggcagagacagcagtgagctgtgatcacgccattgcacagcagcctgggcgacagagcgagaccctgtctcaaaaaaataaaaaaaagaaaaagaaaaagagcttgggtgagacctgggccccgggcccagactgggtcaaggaatggctggggtgagtggcagatgtcatataggaaagaaagggtacatgcaggaatgggagaggcaggagggcaggttccaggaccctccccggccctccacccaacatacctcaccctgcccagcaccaccccaggcccactgctaaggaagttccactcctggtctaacctcagactctcttgttgcaggatcagcttcttcccagtgggcaccaccctcccttgtgatcctacccccagcgcttgccttcccatagtcctcccttcgcccaccccaggaagggacttacctgccgctgcagtgagccgctgtgaggacccacctgtggtcaataaggacacccccgcagcgcaggctggtgccctcaaacagccccacctgccacggctgtgagttacgcccacactcagtgccattgaaaatcttcggtgtggctgcctggctgagccctggagacagacaggggcatgggtcagagagaggaagaaaagatacagagatggagagacacacagagtgagagagagaaacaggcaggagagagagaggagaaagagagacgagaaagagagagaaagagagagagacccagtgatagaaaaagaccatgaaacatcaaagacacccagggagaaagatgcttacacataggagggaaatggagagacagagattcagagagggacagaagggaagagggatcaaaaaataggggagaccgaggtgagcagtaccctgagagctgcaggtaaatggaggcacagagaaagcccctctcctcctcaccaccaggctgggggccagagctgagatggggagggtggtggggcctcctcatgggggtgaagggatccagtcgcagtcctgccctctccctgctccgggagaactcaccaagaacacacaggagcaaaaagatgctgagccccatggtgggtcacttccaaagtctgggggaaaaggggaatctcagaggtcaccctttccctgtgccccccacctctgccctctctgcttctctttgaaggtcaccaaggggatgacctgcttgtcctctctctacctgctcccctgtgtgtcactccctcattggcagtcgcctacctccttctcaccttgtctctttgtctgccagatcctctacgtggctgtcactgtttggcctgtcctcgtcgctgctatctctccgtccacctacctgcctgtcttctcatgtgctggccactccgccagccaactctaccactctgcacctggctcctcagccacctgtcatgttgctcaaccggtccctttccttccatctgtcgctccagacagaccactgacaaagctcttaactctctttgtcctggcccatccagtttccgggttaagggaaggggaccacgaagacaggggtggggcgtgctctaattctgcagaaactcttctcagctaatcacacttaattgagctttacagctaaacggagtggggaaggaggaaaggacccagggtgggaagacccagccccactccctctctcctctgcaagcccgtcagcagccccaggactgatgactcaaggtgactagggagctgggttctaatcctgactccagtgacaaaggagggtggggagaccttggacacctggggcccatccccatgcagtgcaggggaggggcagggggaaggagaggctgtgaaagcaggagagtggacgggaggggcaggaagcccaagctagaaagagtcccagaaagagaagaagagttgaaggaacagacttccaaataggtgatcaggcaggggtagaagagagtttctgaactgagttcatatatgtacatatgaagtggatcaatctaattccataaagtttttctttgctaagaacttctattgcttaaataaaacccacagagagaaaaaaaaaagacacagggaaggagaaatggtagaaagagagagagagaatgagtcacaggacaagggaactttgtgctgttttttgtttttcgttttgagatggagtctcgctctgtcacccaggctggagtgcagggctgtgatctccgctcactgcaacctccacctcttgagtacctgggattacaggcacgtgccaccatgtccggctaatttttgtatttttagtagagacggggtttcaccatgtgggccaggctggtcttgaactcctggcctcaagcaacctgcctgccttggcttcccaaagtgccgggattacaggtgtgagccaccatacctggcctctgtgctggtttatctgagtttttgcttcatctaggaggaatggaaggagagaaagaaggagagagagaggggacagagagagaaaatgagaacaaaaagggaattcggctcagaggaagggggattgagaaacaaaccaagagaaaagcagtcagggccaggcgcggtggctcacgcctgtaatcccaacactttgggaggccgaggcgggcaagtcacttgacgccaggagttcaagaccagcctggtcaatatggtgaaaccccatctctactaaaaatacaaaaattagctgagtgtggtggtgcatgcctgtaatcccagctgctcgggaggctgaggcaggagaatcccttgaacgtgggaggcggagcttgcagtgagccgagattgtgccaccgcactccagcctgggcggcagagcaagactccatctcaaaaaaaaaaaaaaaaaaaagaaagaaaaagaaaaaaaagaaaagcggtcagacagagcgcacaaacaaacaaaaaaacccagaacaaaacagaggagagcaaactcccaccctatgactgtcttttagtccttcactttctctctgggtctccagtctctgtccgtgtctcattttcagaatcacagaaccttagcttttgatttgctcttagaaacgacctaactgctttaactcatcattggtcagcgcgactggcgttgataacgctggtccctacaaagcctcctgctggctgttaagagctttccttctttgggcagagaggataaaaaagcaccatgactgtcctttctctggaaaggacacacgtcacacgctcacagcacaaaaacgccacttcttcctttttctggtgtcaagttttacaataaacctcaactgaataagcaaagaaacaaaaacaaaaataccaacaactacccaactcaacctctctctctttttttttttctgtgtagatttttaagagaatcaggtttactgatgtggaatttatatccaataaaattgaatacaaaaaataaggcgggctcgctgattttaaggagcattcatgcaaattaaaaataccatgtatatagttagtaacaatgtattgtgtacttgaaaattactgaccgagtagggtttaagtgttctcactacaagtaaatataagtatggggccgggcatggtggctcgtggctataatcctagcactttgggaggttgagatgggaggatggattgaggccaggagttagaggccagcctgggtaacatagtgagaccctgtttctacaaacaaaaactaaaaaaattaaccaggcattatggtgacacaggcctgtagtcctagttatgtgggaggctgaggtgggaggatcacttgaccccaggagtttgaggctgcagtgagttatgattgtgccactgcactccagcctgggcactccagcctgcactcccgtctcaaaaaaaaaaaaaaaaaaaaaaaagaccagcatgggcaacatagtgagacctcatctccacaaaaagtaaaaaaaagttagcctgggggaggggcatacctgtggtcccagctacttggcaggctgaggtgggaggatcgcttgagcccaggaggtggaggctgcagtgaaccatggtcacaccactgcactctagtctgggtcacagagcaagaccctgtctctctataaaaaaaaataataataacttttattaaaaaataaaataaaataaatttgtagatgaggaatattttgcctccagaactcaacgaggcctaaaatgttttgggtttgttttaatgctgtgggtgctaagagactcaatagctgtttcctggcagtgtctcagctggaggggtcctcactttaccaaatgattttcagaaatttaaccaaggtggggccgggcgtggtgactcacgtctgtaatcccagcactaggccgaggtgggcagatcacttgagaccaggagttcgagacaagcctggtcaacatggtggaccctcgtctctactaaaaatacaaaaattagccagttgtggtggtgggcacctgtaattccagctactccagaggctgaggcaggagaatcacttgaacctgggaggcagaggttgcagtgagccgagatcgagccactgcactccagcctgggtgacagagtgagactccgtctcaaaaaaaaaaaaaaagaaaaaaaagaaaaagatattcaaccaaggtgggaggcctcatactctgtgtggggcactggcccatcccattgtgtgagttcctctagagtatttgtgaatctagaattagcgtatcctatgggcttcctttggacaagggtgtttgtcaccatatgacgtcatgcctgtgcttttggagaaacgtggatggagctggggtgttgcctgtgttgcatgtcagaacgtgatagcccagagtctggaacttcagcatgctgagtgctttgagctgaaggagattggaagacctcaggaacaagaggttctctccaacctcctcctgctttcctctcctctccccttacttctcctttgaagcagtcacagacactagaattccttttcccctgaagaccctcatgtgacaggtgtcctgcagaggaagaaatgcaacacagaaaggcccagaagaatctgaacaaatgggacctgctgggatcccccctcaatttatgaccaagagatcatacctgttttttggtttttgtttgtttgttgagttggttgggtttttttgagatggagtctcgctctgttgcccaggctgaagtgcggtggcacaatctcggctcactgcaacctccgcctcctgggttcaagcaattcttctgcctcagcctactgagtagctggaattacaggcacctgccaccacacccagctaatttttgtatttttagtagagatggggctttaccatattggccaggctggtctcgaacacctgacctcatgatcctcccacctcggcctcccaagatcgtacctggtttttcacatcacatgtctacatgccaacgccttcttcattgaacctcaaaatgacacaattttccctgagtttttgggtcttcatttctgaaggctttcatgtcacataaaactgttaaatccacttgttacgcttttatctcattaacctgtcttttgttataggggtgctggccatggactttgaaatgcataagaaaaaggtattgcgggccaagcacggtgactcatgtctgtaatcccagcacttcaggaggccgaggcaggcagatcacctgaggtcaggagtttgagaccagcctggctaacatggtgaaaccccgtctctattaaaaatacaaaaattagctgggcgtggtggtgtgcacatgtaatcccagctactcgggaggctgaggcaggggaattgcttgaacccaggaggcagatgttgcagtgaatggagactgcgccactgcactccagcctgggcgactgagcaagactccatctcaaaaaaaaaaaggtattgcaccttttcactactgcacctgcagtagtggccaggattcaaggttccccaggagcagctgggtcaggtgtattgtatcctttccacggtgaaggctagctgcagctgagaggctgttgaaatagccttggaacagagcatatcagccaaatccaacgacggtaacgtatttgccagttgctgattctatggaaagtaatactgggtatgggggccttaatggatatgtgatattttgttttgtttttgacacagggtcttgctttgtcgctcaggctggggtgcagtggtgcaattatagctcactgcagccttgatctgagctcaagcaatcctcttgcctcagcctctcaagtagtcgggaccacagatgcacactaccatgcccagccaattatttctatttttatttttagtagagaggaggtcccactatgttgtccaggctggtcttgaactcctgagctcaagcaatccttgatcctccaaccttggcctcctagagtgctaggattacagatgtgagccacctcactgggctggtacatgatgttctgaaatacatatacattgtggaatgactaagttgagctaattaacattcatccttcacattcttattttgtgtgcatgtggtgagaacacttaaaatctactctcttagcaatttttgagtcctgtagtccccgcttatccagggaaaatatgttccaagatcatggagagtacctatcgtaaaatttaatttataaattaggcgtagtaagagatgaaccacaataatgaataataatacaataaaacaattataaccatgcactgtaataaaattatgtgttatgtggtctccctctctcaaaatatcttattgtactgaattgtacccacctattgtgggactgcggttgaccacaggtacctgcactgcagaacgggaaacctcaaataaggagggactgctgtctatggtacattgttattaactagagttaccatgttgtattaatacagtaaatctcttaaacttattcctcttgcactacaggtgcacaccaccatgtccggctaatttttcaaatttttagtagagatgagggtctcactatgttacccagactggtctcaaactcctgggcttaaccgattctcccactttggcctcctaaagtgctgggatgataggtgtgagccactgtgcctggccatcaacttcttataaagttagatgtatgctggccaggcacagtggctcacgcctgtcatcccagcactttgggaggccaaggcaggtagatcacctgaggtcaggagttcaagaccagcctggccaacatggtaaaaccctgtctctactaaaaatacaaaaaattatctgggcatggtgacagacgcctgtaatcccagctactcaggaggctgaggcaggagaatcgcttgaacctgggaggcagaggttgcagtgagcctagatcgtgccacttcattccagcctgggcaacaggagtgaaactctgtctcaaaaaaaaaaaaaaaaaaaagttaaccatatgcttatcatacaattcagcaattctgcttcgagatgtcttcccaagagaaaggaaaacatatgtccacacgatgatttgtacatgaatattcatggaagccttatttataattgctggaaactgaaagcaacccaaatatacaactggtgaatggataaacaagttgtgatattccatactatggaagactgctcagcaatagaaaggaatgaacttagggcagggcacagtggctcaaacctgtaatcccagcactttgggaggccgaggcgggcagatcacctgaggtcgtgagttcgagaccagcctgaccaacatggagaaaccccatctctactaaaaatacaaaattagccgggcatggtggtgcctgcctgtagtcccagctactcgggaggctgaggcgggagaaccgcttgaacccgggaggtggaggttgtgatgagccgagatcgtgccattgcactccagcctgggcaacaagagtgaaagtccatctcaaaaaaaaaaaaaaaaaaaaaaaaaaagaaaggaagaaagaaagaaaagaaaggagtgaacataaacttggatggcggtctcacgatgtcacgatgttgtccaggctgccaagcagttaatctagacctgacttaacccctggggtccttaaaccccataaagccaccattgccatggggaaggcccctaaccatgacaatactgatttgaagctctctggaggaaaaaaaaaaaaaatcaagtataaatataaacagagtagagaggacccaatctcactccaaaatatatccagtaatcattaaaaaaaaaaaagattaaaaaatttcagcattgtgtgggtataccacaacttgtttttccattcaccggttgttgtatatttaggttgcttccagtttctgacaatgataaataaggctgctatgaatattcatgtacaaatcattgtgtggacatgttttcctttctcttaggaagacacctcagagtgggactgctggattgtacgataagcatatgtttaactttataagaagttgataatactgatttgaggctctctggaggaaaaaaaatcgagtataaatataaacagggtagagaggactcaatctcactccaaaatatatccagtaagcattaaaaaaaaaagattagcattaggagatatacctaatgctaaatgatgagttaatgggtgcagcacaccagcatggcacatgtatacatatgtaactaacctgcacattgtgcacatgtaccctaaaacttaaagtataataataaaaaaaaaagattaaaaaatttcagcattgtatgggtatatcacaacttgtttatccattcaccagttgttgtatatttaggttgcttccagtttctggcaatgataaataaggctgctatgaatattcatgtacaaatcattgtgtagacatgttttcctttctcttgggaagacacctcagagtgggattgctggattgtatgataagcgtatgtttaactttataagaagttgataatactgatatgaggctctctggaggagaaaaagtagagtataaatataaatagggtagagaggacccactcccactccaaaatatattcagtaagcatcaaaaaaaaaagataaaaagatctcagcatagtatggaatagtacaacttgtttatgcattcaccagttgtatatttggatttcttccagtttctggcaattacaaataaggctgctatgaacattcatgtacaaatcatcacgtggacatgtttttctttctcttgggaagacatcttgaagtgggattgctggattgtatgataagcataggtttaactttataacaagttgctggccaggtgcagtggctcacacctatcatcctggcactttaggaggccaaggtgggaggatcgcttgagcccaggagtttgagaccactctgggcaacatgtgagaccccatctccacaaaacatttgaaaaatcagctggtaatggtggtgtgcacctgtagtcccagctactcaggaggctgaggtaggaggatcacttgagcccaggagattgaggctgcagtgagacgtgactgagccactgcactccagcttggacaacagagggagatcctgtatcaaaaaactcctcgcaaacgaaaaaacctgctggtcccagagcgctccctggaacagagagctaatgcctgcttgagaccaagcaatagtcacagaatgagatccttcctctgagagctgatggtgtcattaggatgcatgactcaattcaagacacatagagaggtctgggtccagatacatgaaccaggaccactggaaacagggttacagcttcttactccagttcctaaacagcagctcttgaaacttctgacttaggctgcttaaatctgcaacagagggttcagtaggtctcagcaaatgcagcatccagctcaaagagcatgccacccagccggcggcagtgcagtgagcagaaggcaagaggagaaagaccctggtgctggtgctggtggtggtcatcacctagacccctgctcacggcaccaactccacagtcatccccacagaggcagaacaggacccttcggtgagcgtgtggcatcatcggtcttgacatccgaaccaaatttcggatggggagatccatcccattttttgcagatggccacagcatcaaccttcaaggcccaactccaaagtcccctcctccagaaagcctgactggggtttcttgcctcctcattgctcctacgattttatcacttaacttcttagaatgaaaacttgggcttgctcatggaaaagccagactgtaaaatattttaaagaggtttattctgagccaataggagtggtcatggcctgaggaacacaagctcaagaggtcctgagtaagtgcacactgagtagttggattacagtttggtttatgcattttagggaggcaggagttactggcaaagtcatagatcaatacatggaaggcatacattggtttggtctgaaaaggcaggagatcttgaaacatgggcttacaggttataggtgagttcagagattctttttttttctttcttttctttttctttttttttttttacatggagtttcactgtattgcccaagctggagtgcagttgtgcgatctcggctcactgcaacctccgcctcccgggttcaagcgattctcctgcctcagcctctgagtaggtgggactacagccccctgccaccacgcccagctaatttttgtatttttagtagagacgaggttttaccatgttggccaggatggtctcgaattcctgaccttgtgatccgcccgccttggcctctcaaagtgctgagattacaggcatgagccactgcgcccggcctcagacattctttaatttgcaattggttaaaggagtaaagctgtgtctaaaaattcggagtcagcagaaaggagtgtttttagttaacataaggaaatctgttaactaaaccaccaggtcagagcgacctgcacggtgcatgacgtaacccttgcctggcatggcctcaggtcctgtgtataacctggtatcttgctgtcacaaagagtttgtctcctcagctgtaatctctatcttaacattaatgctggtcagttgtgccaaaccccaaaagatagagggtacgatgaggcgtgtctgacctcctttcccatcatggcagggaattaagttttaaagttttttctggggtcccgttggccaaaagggggacctttcagttggtgaggggcttagaatttttatttatttatttatgtatttatttattgagacaaggtcttgctctgtctcccaggctggagtgccgtggcgtgaatacagctcactgcagcctcaacctcccaggctcgagtgacactcctgcctcagcctcccgagtcgctgggactacaagcactcgccatcacgcccggaaaatttttttttattttttgtagagacagggtcttgctatgttgtccaggctggtctcaaacacctgggctcaagcgatccactcacctccgcctcccaaagtgctgtgattacaggtgtgagccacggtgcccggcccgttatctcatttaattgtcctcacaaccctgctaaataattttcatgctctctgctccagaatgaggaaaccaaagcctctcaaatcaccagggaccgccctcaagatcctctaaccagccagggaagagctggaactggagctcaggccacatgattctcctccgccaaaggggaaagactgagcttaactcggtggcttccaacctgctccagcatgaggcctccattttcccgttggaaatgatcgcctagggtggtctcaaactcctgagctcaagtgattctcctcgcctcagcctcccaaacaaagtgctgggattatagggatgagataccatgtctggcctaggtttttatttttagtttacaggtgttaacgcaaactaaatatggcctgagaaggactctgtacttctgtatttgagtccttgtggatgaactgtaacctagcttaataggcaggcagaatcgaaaacctaacttagtagtatgcacctgttacatctgctaagtcttggccaatcccagcagccatacttcaaccattcatacactgctgagtgttcaaactgtgttcaaataagacatatgccgagctgtaaccaatccagccattctgtacctcactaccaatttctgtacatgatttctctgtctctctcttttttttttttttttgtctataaatctttgtccaccacgtggctgcgctggagtgtctctgaatctgctgtgattctgggggctgctcgattccggaattgttcattgctcaattaaactcctttaaatttaattcggcaaaagtttttcttttatcacaggcttatattccccactgccctcaatagcctggaaagttccacgggggcccagctacaaagcctcaccctggggcactggctgagcttggcctgactctccaggctaacaaggtgaagtccatggggccatcgaagatgcggttccattaaccaggatagggttaaatcaccagcgattttccctagtgtaggtccattcttctgtaagatggagaggatgatattccacccagctgaggccttgggagaatggaataaaaggacttccagtgctgtgccaacctggacaaatgccagaaagcctggttcgtcttttgacaaaatcccccttgattccccattttgcttttctccctttctttcttccttccttccttccttctttcctttctttctttcctttgttttctttctttctttttctttctttcctttctttctttctctttctttctttcttcctctttcttctttcttttctctttctttctcctttcttttcttctttctctttctttctttctttctttctttctttctttctttctttctttctttctttctttctttctctttctctcttgctttcttgctttcttgctttttgtgagacagagtctcactctgtagcctaatctggagtgcagtggctcaatcttggctcactacaatcttcgcttctggggctcaagcgaatctcctgtctcagccttccaagtagctgggactagaggcatgtgccaccacacttggttaatttttttgtatttttagtagagaccgggtttcaccatgttgccctgggtggtctcgaactcttgagctcagggagtccacccgccttggcctcccaaagtgctgggattacaggcgtgagccactgcacccggcttctccccctttttcaaggcttctccatctcctggctccaccagttctctccaaattctttccagtgcaggcttccattgttattaaaattcccctgggcaaaaacaggaagaggagggcaggtggctgagaaatcccagaagggggaggagggagggaacgctgagtagctcaccacctggccggccttcctgagtcgaggtggtgttgatagtcagaatctccagcccagctatgtcattattttctgttccataggcaggatttgggtggctgcctcctactctccaaaatccacaggtgtcactcaaggcagctctcctggcactgggaccttggagacagcctcgtagttacactaataataagagcaacaacaatactgaaaaaaatgacagctaccacttattgagttctcactctgtgcaaggcgttcttctgagctttccacaggagctcaattaatcctctcaaatgcattccacagtcagtgctgttctttttcattttaaaaagtttatgaatacatttgggtagtccctaatcctccggtggaaagagttgaattcgttggtggcacattttcattagtgatttggagaggatccctcttttgttttccttatttattttgttcccttttatttcccttcccttctactattgtctttatcattgtgcacattttgccgttatctttgtgaacgtgtatcctttgctattgtttttattattgtgtatccttcgcaattattttcgctctcttgtctcctttacagttatcctcattattgtgtgtattttgctgttgtatttattattgcatagccttttattaagttgaaattcacaaatcataaaattagccacttaaagtggacagttcagtggcgttcagtacattcacgacgttatagatctttttattagtatatgtccttacaaattgtgtgttgttttgtgtgcatttgaaattcatatcaatggtattgtggtacgtagcttattcttttctttccccccgccccccgcgcacagctgtgctttttctggccgggcactgtggcttacgcctgtaatcctagcacttttagaggctgaggcaggcagatcgcttgaggtcaggagttcaagaccagcctggccaacatggtaaaacctcatcgctactgaaaaaaaaaaaaaaagcataaaaaatacaaaaataagctgggcatggtggtgcctgtagtctcagctactcggaaggctgaggcaggataattaattgtacctcggaggtgaaggttgcagtgagccaagatcacgccactgcactccagcctgggccacagagcgagactctgtctcaaaaaaaaaaaaaacaaaaaaacaaaaaactatgctttttcattttctaataatatattatttacataaaataaaattcatccactttaagtgttcagtttggtgaattttggaaatcgggtggaatcatgtaagcacctccataatccaaacataaaccagctcctccctgtctccctccctcactgccctcatccttaagctgcctgccttctgccccttttgcaaaagctccccgcaggtgacactgacgggcactctgcctctatggttttgccttttttagaatgttgtatacatgtttgtcttcttttactagcataatacatttcagattcatccatgtttttgcgctgataaatacactcatgggaaggacattgttttggactaaactcttggactaggccctagcagaacagaccaaaccagaatggagtcccttgtgctaattgccatgtaatcaaactgtttttgaaaataacaaacaaacaaacaaccaggaggtttacagtaaggaatcagaaggggcccagttgacctgagctggcaggataagagagttccctctgtcttaaccctattaaaaacataacgttggaaagaccaatccacgtattattccctatttctgtttccttcatcccttttctgcctataaagccaaactctgctcagctcatgggaacaccattctattttgtggaatgagatactgcccatttgtagaattgcaactcacagtcgattagatcttgaaactaaatgtgttgtaatttagtcttttgaccgcatatcaagagttcattcctttctattgctgagctgtattccgtagtatgggtataccacaacttgtttaaccattcaccagttgttgtatatttgggttgcttccagtttctggctattataatacaaataaggctgatacaaacatttatgtatcaatcattgtgtggacatatgttttcatttctcttgggaagacacctcagagtggggattgctggattgtatgataagcataagtttaactttatgagaagttgcggctgggtgcaggtggctcacacctgtaatcccagcactttgggaggccgagaagggcagatcacttgaggtcagaagttctagaccagcctgatcaacatggtgaaacgctgtctctgctaaaaatacagaagtaagccaggcatggtggtgggtgcctgtaatcctagctactcggaaagtcggtgggagaatcgcttgaacctgggaggtagaggttacagtgagccgaaataaatagcaccactgtactccagcctgggcaacagagcaagattctgtctcaaaagaaaaaaaaaagaagttgctggctgggcacagtggctcatgcctgtaatcccagcactttaggatgccaaggcaggaggattggttgagcccaggagtttgagaccagcctggacaacatagtgagacccccatctctacaaaaaatttgaaaaattagccaggtatggtggtgtatgcctgtagtcccaactacttgggaggctgaggtgggaggatggcatgagcccaggaggttgagactgcagtgagttataattgtgctactgcactctagtctgggtgatggagtgagaccctgtctcaaaaacacacaagcagcagcaacaacaacaacaaaaagaagttgtcaaatgttttctaaagtggttgtaccattttgcattgccaccagtagtgtggtgccagttgaacttggcccatatctttgtcaacacttagtattgtcagtcttttaaattttcaccattgtagttggtagcactatacctttaagatttgattcctgctaaaacggtgaaaccccgtctctactaaaaaaaatacaaaaaattagccgggcgtagtggcaggcgcctgtagtcccagctacttgggaggctgaggcaggagaatggcgtgaacccgggaggcggagcttgcagtgagccgagatcccgccactgcactccagcctgggcgacagagcgagactccgtctcaaaaaaaaaaaaaaaaaaaaaaaaaaaaaaaaagatttgattcctattgctgtctctagtttgttacttttaactgctgcaaagtcctccatgggggaatccaccacattctatcatccactcccccattaataggtaaccaggtttcttctaatttccaccacagcaaaatactgtgtgacagagagcttatatctctgcccctttgtgatgtgcataattattacctttgtgtagacatccagaagtggaactactgggtcttaggatgtacatatacttaattcagccaagcaatgccaaattagtttctgaaataaccacaccaatgtacgttcacaccagctgtgcacaagcgttcctgtgtttccacatctctgctaatacttggggttacttaactttgaaattttcttaaatccatctaacaaatgtaaagcaattgttatttgtatttgtgtttcttggatacctaatgagtgtgagcatattttgtatgagttttttgagtttccttctttataaatctgttcatatcctttgctcattattcttattttttttttgcagtacttccttgcatatttgggtcaatatgtcaatcttaagtcaatagtacagactgcaaatgtcacctctcaagctgttacatgttgatttaccttgtccattgtgtcttttgatgaacagaaatctttaactttgatgtaatgaaattaaacattattttgcctttagatttgtctttctgaagttttaaaaaatccttcctcaggccaggcacagtggctcacgcctgcaatctccgcacttcgggaggctgaggtgggcagattgcttgagcccaggagtttgagaccagactgggcaacatggcgaaactctgtctctacaaaaaatacaaaaaataggtgggtgtggtggcatgcacctgtagtcccagctacttggcaggctgagagatgggaggatcacttgagcccaggaagttgaggctgcagtgagctgtgattgcatcactgtactcccgcctgggtgacagagtgagaccctgtctcaaaaaaaaaaaaaaaaaaaaaagaaggggaggaggaggaggaagaaaaagtccttcctaatccccaaatcacaaaaatgttatctgccattatcttcttctttttttttttttttttttttttttttttttttgagacagggtctcgctctgtcccccaggctggagtgcagtggcgcgatctccgctcactgcaagccccgcctcccgggttcacgccattctcctgcctcagcctcccaagcagctgggactacaggcatccgccaccacaccgtataattttttgtatttttagtggaaacggggtttcactgtgttagccaggatggtctcgatctcctgacctcgtgatccgcccacctcggcctcccaaagtgctgggattacaggcgtgagccaccgcgcccggcctctgccattatcttctattaactttgtagtttgaccttttgcttttaggtcttaaagccatttggtgttaagcaccattgttatacgtacttgagtaatgggaaaactgaggcacacagaaggtgagtaatttgaagactatacagttcaacaagtgacagagctagtattcaaaccgaggcagcctggcccctgaaactgtgttccgtagctactgtgtcatgctgcttctccattgaccaggatcggtgattcagaagttgctgtgtgcagagcctttaaatgccaatctttcactctgtcctcccaacagccctgagcagtaaggcctgttattaccagattaaagaactgaggttcccaaaagataaagtggcaaaaccagatctttcagactccaccctttgtgtttttgaacactaaactatagtctcccctgaaataaccaggaatcacgcaggaatcatcctcaacattcaccctcacccccacagacacagttgatcctcattattcatgaaatttgtattttcaaatttacctgcttgataaaatctgtgggtagcccccaaaccaatactcttgggacttttgcggctgtttgcaaatatgcagagtggtgaacaatttgaattgcctgaggtgcatgctcccagctgaggtcgattaaggcgatgctgtcccttatttcagctctcattctgtaaacaagtgtcctttttgtggtctagttagtgccacgttttgcacatttttgttgatttcgctgtttaaaatgccccctcaggacagtggtaaagtgcgtctagcatcctaagtgcaggaaggctgtgatgtaccttatgggaaaacacacaaagctgggtgcagtggctcatgcctgtaatcccaatacactgggaggccaaggtgggaggatcacttgagtccaggagtttgagaccagtctgggcaagagagtgagaccccatctctacaaaaataaaaaagaaaattagctgggcatggtggtatacgcctgtagtcccagcaactcaggagctaaggcgggaggatcacttgagcctaggagttcagagctgcactgagctacgattgcaccactgtactccagcatgggcaacagagcaagatcctgtctcaaaaaaataaaatgaataaaataaattttgaaaaatttaaaaagaaaatacacatgttagagaagcttcattcaggcatgagttacatcgccatcggctgtgagttcaatgcatgtatattaagctgtctttaaagagaaacacacctaaaacaaggttatatattgatcaggtgacaaaaagattgtgaccagaggctcgaaggaacctatatttcccccctagaagcaatgctttaatagttgctaattcagtgttagaggtgactttatagaacgtaagtaactactgtgaataatacgattgattgtattgccgagtttcctcagtgtgactgcaaaacgctcattctaatccatcttcatctctgttggctgagccatcatcttacccactgattactgcagtaggcttcaggttcatctcctggcttccaatactccctcctggtaccttgtctccaccagtaacccagcaaccagagtgataatccgatttcagatattcctcccctgttgacactctccaggagctcccccactacaatgggagaaagaccacctccctgactacagctaaaaagattccgaatatttggctccagccaaatcctccagtctcattccctacccagtcactcgttcatcattactgtacagtcatgctggcctgccctcagatcctggaataggctaaactcaaggacgttggcccagtggtttcctttttcagaggtatttcccccattctttgctaaactggctccctttaaccctttggccacatgccaccttctccgagaagcccttcttgatcaccctattcaaaacagcctcctcctttattctctaacacaaatccttgcttatatccttcatggaaatgattgcatttgttattatcatcacacagaaatcatcacaatctgcagttatttagtttgtgtagttgtttcttttctttctttttgagacagggtttcagtttgtcacccaggctagaatgcagtggcgcaatcttggctcactgcagcctccgcctcccgggttcaagtgattctcctgcttcagcctctgagtagctgggattacaggcgcctgccaccaccagctaatttttgtatttttagtagagacggggtttcaccatgttggccaggctggtgttgactcctgaccccaagtgatccgcccgcctcagcttcccaaagtgctgggactacaggtgtgagcctccatgcctggccatagttgtttattttctataaattctcagagaacagtttatttccacttgagtgtctaataaacagttcaagacaaaatttcctcatctctgccctaaaacatgttcctctcagtttctcgcatttttgtaaatgaaagctccatccttcctgttgctcaggccaaattgctggagtcatcttcgactcttctctttttctcacattcccccatctgatgttggcagatatggtccaacagtcccatcaaacagatccagaatctgacctctcgcctcctctacggccatcaccttggtccaggaaccgtcaccttttgcctgggctaatgcagtcccttcctcgctgggccccctgagtctgttccccatggagtagccagaggaatcctgcgcacattgaaatcagttcaagtccctcctctgctcagagccctctcatagctcctggctccctcagaggaaaacaaagtcctcgtcgtgccccacaggacccaatgcagtctgctccgttcattctctgccctcacctcccaccctctcctccttgctcactcagctccagccacaccaaccttttcactgatcttcagacacaccaaacaggctcctgcctcagggcctttgcactagctgtatcccctgctccagcagctgctcctcagatatgtgctttgctccttcccttcatcctttcggtctttctttaaatgttaccatctcagttaggtcctcttccctgaccatgctgtttaaattgcaatgccaccccttccacatatacaaccctacattcccaattcttaatcctttcttctacctcttcctcttcctcttgctctccttccccttccccttccccttctccttctccttcttcttcacagggtcttgctctgtcacccaggcttgagtgtactggcacaatcacagctcactgcagcctcaaactcctgggctcatgcaatcatcctgcctcagccttctgattagctgggactacagacttgtgccaccatgtccagctaattttttaaacttttttgtagagatgggatcttgctatgttgtccaggctggtcttgaactcctggtgtcaagcgatcctcccaccttggcctcccagtgttggtattacaggcatgagctaccacatatggcccttgtttcatttcttgctatggcttgcagcaccacctgacagcctatttctttattcattgttatggagacttcttgaaaagaatgtaagttctacaagggcagaagtttttatctgtttaactcattggttatcacttgtctctgcaacagtgcctggctcttgataggtacaaatatttgttgagtaaataaactatatttaacaacacccaggagagtgcttgcacatagtcaacactgaagaaatgtctcctgaggaaaataaatcagtgcaacactttttttggacactctgcaaattcgaagggctgttattaacattctaaggtaatattttatgggaaccatgcaaataataatagtgataaatgcttgacatttattcttgtaataatgttacaattaaaaaaaattatgaacccattttacagatgagaaagcacagagactgtgagttttataacttgtccaaagcaaggatttgcactacattttagggtcatgcacaaagatgtaacagcaagggacactgaccaaggatgttcatggaggggatacaagacggaatatttggtagacaataaagttcaggcaagaagaccctttggtatactgaaccctataactctagagactagggtgccattgattcagagagggaatgttggcagaggtggggtattggaagaatgtgggatgtaggttgggttgggacttctgagacacccataacagtgtgagaatgaaatattctgaggatccaatgttagctgtggtgagtcacagaggtacacagaatgttgtcagggcagaagattgtgggcataagagaatattttcaggatgaactatcatgggagtctagagccttcttgagtgcaaaaaatagaaggtctaggatactggcattgaataaatacttgaagagttagaggatgttgtcaaggatggtccatttataggacatatattgttgagatgggctgatggaaatatttaagaatgtgccacagacagaacgttcaggtggtgatctgggctcatagaagccacactgatgaagttgagagacctgggccattgtctgggttgggacattcaggttgttgagatgtttcagggatgcaacatctgggagactgcaagcctggcagtgcctgaatgcttctgaaacatggaatgttagctgagattgagcatttttcaggacatggatcactggttcaaatggaacactgggaataaggagcagagaagggctaagcagaccatgtgaggaagtcatggtgacaggatggaagccggtacatttctcaacttttattgtgggcccttcaaccatttttgctgctgggtttcatattttcggattgtttcacggatccacaggacgtatcttgagacacgggtgtagacaccaggccggtcaggttgcccacatgggaagtctccccaggagacgatgccatacagtgttctgttacagaccagggggcccccagagtcaccctgagttggggaaagaaagagagagagaggtgggtccttgctggggctaaacaaggcagggacagggaggtgtggggagagagtgaaagatggagagagacacacacagagaaggagactcagagaggcagagtcagacacacacagtgtgagagaaagcaatgaagacagtgagaaacagacaagaagacaaacacagagggacagacagcaagagacagaaatagggacagaaagacagagataggcccagagaaagagagacacagagaaatttctgtgtttttctctgttcctcagtttcattaaaatggtaacaacttacttcatacccatttttgtttccctggtactaaatcaccccctgccccacaccagctgaccctgctcctatttaaggctcatttgtgtctctcactattgagtgaacccattcatatctgggcagggtatgcaacacacgtgtaagtctatttctcttcctgggcccaaggcagacatcactaatcgatcaaggcacatatcattaatatagtatcatactctttctcactgaatccaatctcaacttctttattgatgaaggctattttttgctcatgtagtatccatttcctcttatttttaaaaaattaaacattcatttttaaatttttatttatttatttattagagacagtgtcttgctctatttatttctttttgttttagagacagggccttgctctatcacccaggctggagtgcagtggcatgatcatacctcactgcagccttgaactcctgggttcaaatagtccttctgcctcagcctcccgagtaactaggactgcagttgtactccaccacacctggctaatttaaaaacttttttttctttttgtagagacagagtctcactatgttgcccaggctggtctcaaactcctgggctcaagtaatcctctcacctcagcctcccaaagtgctgggattacaggcatgaactactgtacttggccatttccccttattttggtaacagcctctcctgattttttcatttggggaactgcccttctccacttccaatccatgcagtttgtccctgcccctctccagcacccacagttaactatgtgactcaggcttggcccatcagagaatcccacagctctggtggagtgatggctcaagacacatgacttaggtcagcctagtgagaatcatgcttaagacttttgtgtgaactattggaaaagagaggttctctttctaatagggttgcctagagggtaggatgtaagctcaaagctgctggggccatcttgtcatgggaagaatctaaccgagaatgaagccaaaacagaataaagaagagctgagagttaaaagaaagacagaattccaaacacacaatttgcatacctggatccatctgtgcctaaagccagacaacctggattttcagttacaaaagcctgcattttgtttaagccagtttgagttggttgtctatcactcacaagtgaaagaataccaacctttatgcatctcaacacagggatcttggcagccactcagtcaaagctggggcttatgatgaattattcctgccatccctgggtacccctttttgtcttgacctcctatgtgaggggacattgtatcttataaagattggttcccctaaggctggaaacaaagctttttccccagcatctgtcacttccattctggctttctatcctgtccaaggcacccaccagcctcccggcctcacctcacaggagtctttgccaccctcttttgtgccggcacacaacatgttgtcagtgatctttcctgggtagacttgacgacactcctcatctgagcgaagttggatgttggcacattgtagagttttggggtaattcactggggagaagaaagagaaggtctaaggtatccgacctggataggatatgggatgaaggtgaaataggcgagttgaatgggtaaagagtagatagaaaattgagatgggaagagaaagatgggagaagagatgagcacctatctgggtaaagcaacggaagtgacagaaatatggagggacatgggagagaggcgaagggagagatgaggagaaaagtggagggaaggacaaggagggaagggacaagagaatggaaggttgataaggagagtggtggagccagcggtggggagagaaagttggagagagggagttggaatagggagatggtcagaaatagagaattaaagatgggaaaagcaggaacagggatgggaagagttacgggagagttggatagaatggtaggaagagagacagggcatgttgaggagaaagatacaaacatgaggctgggagagagtcagggattgctagggagatgcaaagggctcttgtcggtatatacatcaactttatattcacatatataatgtattatacttactaagtaatgatatagaattaattattacattgaattattagacatttcattaataaccatatttaatatattaaacattttataaattatagaaatataaacattttatatgtatgatttatatattataaatgataaaattcatttacagtatataaatatataaatgtatacatttataaaatacatttataatatataatttaaatatagattatatataatatatacattatgcagaaatacatatttaaaatacataattgataaattttataatttataaaatacatttaatttgtatactttttgtataatatataattatattactatataatacataatatacatcatataatatattcatatattagatctatttatatttctatatattcatgaatttatatactcatatttttatatattcatgaatttatatttatataaaggatacagctaactttaaatatatatatttatttacttatttatatttttatatataaaggaacctacctcagaccttccctcccatctctgcccctgtttccccagccactcctatggggcctcaggccacctgtgtgggtgcataccctgggggctggtggtggtgccccagccagacacccgacaggtggtgccaggggttaggcggttgttgtgggaaaggggcagggtttggatgtagcctgtgagctggaccggggactgcagctccagaagcatgatgtcatggtcgtggttcaggtgggtggggcttctccggtattcagggtgggggatagagtggacaacttccctcacctgctcaccagcttccacacgccctagggcgtgcttgcctaggtaaactttgagccccctgtgggtgcagaaagaaggtggttaggaaagaagatgagcccatttccatccccatcccagccccaacctcttcccatccccaacctaacttcttctccatcctaccttcctcatctccaaatacatctcccccatcctcaacttcaatcccatccaaatcccctactttgattctattcccatacccaatccccatatctcaaccccaaacctcattctcactcccatgtccatccccaaccctaactccaactccatcctcaaatccaactctaccccatccacaatcccagtcccattctcatccctaccccatgctcccccggcccccacatactcctttagacagtgtgcggcagtgaggacccatttggggtggaccaggactcccccacagagtagccgcccttgcactagtagggcagcctgccagggctgagagtgggggaagcaggtgtagccacctgggagaaacccactggtcccattggtgttgagaaccttggaagactcctgggagacacctggtaaagaagagagattgttagaaaactgggatccagggggcagaggagccctggggttgtggtttctgggtttggggtaagggtcggattattgccctgggtgaccaggaactgaagatgaatttgccgacctatggcagttgctattcttgaccaagtggagatgaattagggcaaaggggtgacattattttctcaggaagtaccaaatcctccactgggggttaacagaagagttcacaaaatgaggatgttgctgataggtaagcaggagcctgactttctctccacatgcattttttatatcattctaccagaagatggatttcaggaggtagaagtgagactgacctacacatccacctaggcaatatctatccatcaatctatccaatcatccatcccccattcatcctattgatttgtccatccgtctactcatccatctatccattcatccatttaggtagtcatctaaccatctatccatccatccatccatccatccatccaaccatccatccactcatctgtccctccatccactggtccatttattcatccatccatccatccatccatccatccatccatccatccatccatccaatccaaccatccatccatccatctatccatatatccatccatgcatccatccaatcatctttccacccatctctctatcctttcactgcatatatactggttgcctccatggctttaaataccagctataggctaatcatctccagccctgaactcttctttaagctcaaaactcaaacactgttgatttggatgccttacaggcatcttaagctttgtattcccaacttgattcttctcaatcaaaactgttcgctccagtatttcccacctcagtgctcagccccaaacctgggagtcatctttgcttctcttctttccttcatcactcacaaccagttcctattggttttatctcccaaatatccagttatctccacacttctgccaccatcttggtccatgccccatcttctgtagcccaaatgactacaacattaacctaaatccttccacttttacatccctccgatccagtcttctcaaagtaggctgaggactcttcaaacaaagaaagtcagatgttgttcccaggctcaactttctttaaaataaaatccaaaaagccttcccaaggtgtgcaggactctgtgctgtctggcccttgccagcctctttgaccccatctccaacctctttcttctgacttcctctagtccagcctcatgggcctgttcttcaaacacaccaggcatttaaagaaaagaagaatttaaatcatcttggatgcccccatactagacattttatacttgctatttcctctctctgcacagtcctttctccagacctatgttgtttaatatggtagccactagctacatgtggctatttaaatttaaactaattaaaatgaagtaaaactaaattaaaaattcagttcttaagtcacaccagccatatttcaaatgttcaatagcctgaaggggctagtggataattggacagcacagatataggatatttcatatatacatatatggaatattctactggatgaccctcagaatttagaggttgtatgtctgggtccttcttaattctgagaggtcagctcaaatgtctcctcttcagaaaggccttccctgaccacctggtctaatgttgactctcctggtcccgactcctcccccattacattcttccagttggtcttcatcagaacaatgattgctattcatttctcttcacatttgtatgtattcgtttttaaaaatctctccactttgactgtaagctccattgacaacaggcaccttaactgctttattcagtaccatattcccaggacctaacacagcgcctggcacacaatgggggctcaataaataaatgctgtgtgtgccaggcactgtgtctggcattgaaagcacagcaggggtccgtgggacagggagaatccaatcctgaacatgcatgccattttgtgactgtgtgaccttatgcaaatcaccagcctcagtttccccagctgtcaagtagaaaaagtaatagttcatctctcattgcgcagttgaagaattcaagatgatcctgcatttcaaaccgtgcagcacagcaggtggcatggagagcactcagtcagtgggaaatgttattattaattattagctacaacaggaggtccctctgcctccctagctagtttccccaactacagggcaagcagttggattagctcagtggtttgcagttagggacagaagttgtcggtgagcacaggatcattttagatggtagagagatgagatttaagtaacgttaaatcgcacactcagacgctgaaccagcatccagttctcttttaaacctgattttgtcaaggataaagtctcaggatggtgctaatatggttttaacacctccctaatcctcactgagctcacttttcaaagccaggaggacacagaagcctcatcaggccacctaacatttattacactgaaccatctgcaaaagttgttttaggaaggtcaaaaagggtcaagtatcagcaatttcaggtggtccaacccaataaacatattattttcttttcattgtgcaggatttatttccttccttaccttctatttatgacaaagaattctattctctattcaggacagtaatataaagttgaacatgcttttgtttgagtgaaaaaagaagaaaaaaagctaactttaagcaaatgattaggtcaaaagttataaaaatggttttcagagcctcaagtccaggatatggacagggaaaacaaccttgattaggattctgactcaggcatcgccggtgtcattggagcaggagccttctgtctttgagtcctaggtttctctgccatgaaattggagtaattacaatgcacctacctcgccaggttgttgaggactccacaaggcgtagcgtgtgggtctcctagcctagggtgtggcactcaggagtggcacgggcatgaatccagggagtgtcgccagaggagaaaagccaccccaccttcaggccaaggatggtgccaggtgccaggcacccacagatccctcctttttcaggtcttggctcaagggtcaagccctttgggaaggcctctggtcgggaagccgccattacatctctaggcccctggcttggctccttgaagtcttcacctcatgtcaagataattattaactaattatttggataattgtttgaataacatctgcgtctgtccccgctagactccaggtgctgagagcagggactgtgtctctgcttgtacagcacccagcacagtggccggtgtttaatagctgtttgttgaatgaataaatgattcatgaacggggtttccagagaacctgcctacaacggcagggaaagatgggaaagatccataaggatcttaaggactaccaatttggggtgaggtcacataggtttggggtcaacccaaggattaaaataacaatctagaaggttctggaaggggctgagtatgaagacagaatactagaggccgggctcggtggctcatgcctgtaatcctggcactttgggaggctgacgcgggctacttgaagttagaagttcgagaccagcctaaccaacatggcgaaaccccgtctctgctgaaaatacaaaaattagttgggcgtggtggcgggcgcctgtaatcccagctactcgggaggctgaggcaggagaatcgcttcaacccgggaggcggaggtttcagtaagccaagatcgtgccactgccttccagcctgggagacagagcaaggttccatctcaaaaaaaaaaaaaaaaaaaaaaaggaatactactaataaagtaataacggctaagtggctaactttcaagtcccttctacctgcgacatactgaaggctcgacgcattacctcgtttcaatattcacagtgaccttctctggtaagcacttatagattaagcccattttccagatgaaaacaatttaggcacaaagcagctgctaggctactggctcaaagcggcagcgtcaggacgcgaacccatgtctttcagctttccagagaggacaggaagccttgaacgcgggaggggctgctgcgagggtattttgggaggtgaagggtctggggtcggagggccaacctcagccgggaaaccaggtcacccagggacaagcaggaagagctctgagctgtccccactggacccggccccgagtgggcggggggcggagctcgcggctcccacgccccctccccctccggcctgacccctcctaccattgtcccgaatggccgccgcgcctccacccccgcgcattcttacctcctgacaaggccaaggtcagggaggcgatcactagggccaggggccacatggctccgggatcgggaggggagggcagggcgggcggggcctgaggagaaggtgaagggggtgttgagggcgtgcccggaacctccgcgtctgaaacctctctgctcctgaatgtctcctcgcctcattcactcttgacagccctgaccctggaatctgccccccgcctccaattccatccttggtgggggtgcagtggcgaggtgggaggaacagtgtgcaacctcctggggctccggcgtgcagcccctcaccccaggaagccgtccctcctcccctgccctctggcgagctgggtggtcggtgcactctcgcccttttcctccagagtctgccttccattctacccctctgggtctgtccacacgcttggtattagcccaagttcttatctgtccgcgcccttcgcctctctccgtctctgcaggtttctctctagatctgagactctagcttcactctccctctccctgactcagctgcccttctgctttccccatccttcctatcccctcttctctcccctccctgccctcctccgctccccgcccccgccccaggcagaccctacctgagtgaggggcccacgaggagcgtcagccgccagctgtctagaacttcagccccgaaccatggcttttaacccctgaactccctcccccagctcactcagcatttcctggtccctggcctccccctctccacccccagtggctcagcgggatgtctccaggcacccccgacctgggcttggccctctgcttggggcggagcttccaggacgtgctgggacctaggtctgaccccgcccaaggcagagttgaacccactgtgaactttcaggcctcaggacccaaaaaagggtaaggggaaagcccatttccttccccctaccccgctgagttccatgcccatccctaacttcaacccattctgcacccagttttctaacctcttctccaaccccatgcataattcttaataggcagtcagcccccagatggccgtgttctatcagattcccacctccctatccatccctaaccataccaagtactccagcctgttcctcaaccccagtcccatctccaacctcatctcaggtttagctctcaacacatccaggttccaattcccagtctcatctcaaccctttttcttttgaaagacacaaggacacccacaattatcccatcatcctgcctccctgctcccgccaaccaccggacacaagaaggaaatcatcagctgggtggatagaaaatcagctccctcggacttggatgggggcagagatgcgacctgagaaagcaacattttccagaaatggccttttaggagcagggccagagggggtgagggagtccacggggacctaggtggagaggaaaaagcaggagccggaaagctttgaagacgtggattgggggtgggggagaggaaggaggaaggggtggtgttttgagaatgagtaggtgtctccaggaactatgactgggtggagccctgagttaatcctagggggtggaggggacaggattagggattaaggactgaggtggggtcagaatttggaagaaagccagggacgtggaccagatgaagtttggaaagagtgagagagtggaggtgtcacaatgaggataaagaatagagatggatggggcgagggctcacatggaaacttgtacagtccttattgatggagttcagatttggatgtggagatcaaatctagtgtcaaagggtaacttttaaaacatggtcttaccatgactctctgacatatatgaaatgaacatgtgtcaaagattgtatcttgactcattaataaatggcagagccagtaagatgttacaaagagccatatgcacagagacaacgaggaatgctgaaatgaatttacaaatagatgcaaaactggctattccacactgggaggaggagggaaatccattgtacttccacctggcaaaattcatgtaaacatttatggacaagaattatttgcattgctctcagatacctacaatttagagtcataaagtggctcaaagacaggaaagggtacagagacctcataaaatcagataacccatctaactttgcattggcgacacctcagtgtccaatgttgggtccatttcaaagtattttgctaagaagaaaaatatggcttaatataggaaatcagtagagtctatggttaaggatgggcctgatgacaacattaggaatgcaatgagtttggggaggtgaatgaaaattggatgaggatgggtatagagttggaggtggtagttgagctggttttgggataggattagattgtaagatgggaggtatctagggataagttggtgttggggtactgttgggttggggctgaagatggaaccaagattgaggttttggatggggaaatgttaagatgtggttgagctggggtagtgggttgacatgggtgatgaggactggccatgaggttgagtgtctatgatgcagtaggttttggtgggggtgagctgggtcataccccacctctcaaggtgaaagaaaggtcactgtctttctccaccctggacttctcccacctcacagggcggggtctgagttcactttttgagtggaattgtgttcaggtggtgtggctggaggtaggatgccaggttaagtgcggcaaccagcttatgtgggaaatcggggtacttgtaccctcctgtgacctgggtccatgcttccagagaagcctttctcacttgggaaaagctggagcctggagtgagggtggttggccttgttatttgctgaggggtgagtgccaggtcaaattgatgttaggggttatgattggccgaacgcgggttgggtagctctggttgaagtgaggtcatggacccactgagggctgggcaccttccaccccctcacttgatgaacaagcccacggctgaaagtcacacacaaactggaccaaatccaagtgcgcttctgtcacaggtgcaggtctttcctccaccacagagaaccgggctggagaaagaagaagaaaggacccgaaaaagagatggtgttcctagtggttctgacctcagactctggagctagactgcctgagttcagatgatgtgactgctctgtgcctcagcatccccatttgtaaaatggcacaatcaatagcacttgccttatggagaagggttaactggattaatacccaaaaatgcttcgaagagagtgtggcatggaccaagggccacaatgctcctgttaaataagtaaagcttaagatggaggcatctgacggttccaggaggcccctccctatcttggcttcaaaatgggattctttgtcaagcaggaactggaacttctggttggaagtgctagctgggatgagaaagtaggccccacacccaggcccagaggaggggccccaacgcaaacatgaagggaggggaagactgagagatacaaagggctaaatacacagagacagaaagatggggcaggtgggagaggacagaaagaaaattcagaggacagaggcacagagatagaaagagagagatgcccagtgagaagcagactcttggtgagaaagaggcacagagagttgagaaacatggattcttctttagagctggatccgtgttattcaggatgtggctccagtcatcatgcatcccaggcagcaataacacatcgctttcatccatcagaatagcaaaaattagaaaggtcggtcttgccacctacctgcgtgcccacatcctctgtctcctctcccatttctctagatgaacagtctgcacctgcagctaagatagatgcctccactggtgctggtatcctgtcctctcttgccttctggagggcattgctccagccagcagttctctgttctctttcctgcaacatgttttccttcttctccaaggagcagccccattagcatgcaaatatactacagtttctcccatctctcgttaaaatttgaaaaccaaccaacaaaaatttctccccactctcatgttctccttcagctcctggcccattttctgctctgtacaactgcaatccttccctaaaaagttggctaagctcactgcctgcaattcctgtcctcccgtcctccctggagcccacactatgaaggctttctctcccattgctgtaccaaccatgcccctgtttagggcaacagtgacctccacggtactgaatccaagggccgtctcttcaggttcatcttactggagttatcagcagcatttaacaagtggactactccctgtttctttccttggcttctgggacactatgctctcctggttttcctcatcactcactggttgattctcatccgtgtctggaggtggtttcttcctgtctccccagtctctacatggtggagcacctcaggcttcggtccttggccttcttctctcctctgtctatattcactccctcggtgatctcatctggtctcgtggctttaaataccatctacatgttgacgactcccaaatttatgtctccagccaggtctgactctcaaactctccacttaacatccagctgcctactcaacatctccatgttcaaaaccaacttctgttctctgcccttcccatgttccaaacatacttctcttgtgggtcttgggcttctcagcggatgttcacaccatccttttcattacctggtcaatacttcagtctcaccgtcgaatcccttttctcacaccatacatacattttgttaccaaattccatcggttctatcttcagggtggatccagaatctgactgtttcttaccacattccatctttgctaccctggtcccactcagcctgcatcatctctcacctggattactgcaagtttcctatctggtctctttgcttctgtccttgtcctcctacactctaattttaatgcagctaccagagtgaccttttagaatgtaagtcagagcaggtcacttttctcaaaaccctgcagtagcatccactgcactccaagtgaaagtggcatttccttctggttggcatataaggcccaagatcttctcttctcttgtccctctaatgctgggcatgcttccatctcagggcttttgtgcctgaaaccctcttcccccagatgtctgcatggtcccctgtattcttgccatcttcttcatgaaggccctcttgaccactgttcttgggagtctccaggacagtttcagtgattcactagaaggactcataaaactcagaaaagttgttatagttttggtttcttacagtgaaaggacacagattaaaatgagcaaagaaaaaaggtgcatcgggcagagtctgggagagaccaggcatgagcctccacctgtcttctcccagtggagtttgtggacagtgcataattcccccagcaataatgtatgacaacacgctggagcatcgccagccagggaagctcacccaagccttgatgtccagggtttatattgggggttagtcatatcgacatgactgcctgtttgtgtggctgaccttagctccagatcctctagaggtcaaattgatacaacatgtccctaggtccccaccataagtcacattgttatagattatctggcatggctcaagccccagagagacaaagacactgttacttagcaagatattccaagagcatagaggttatctcccagaagccaggcaagggccaaaagtttcactgtagtgtgcagggtttggacagtccaagcctgctgggttgtacaaccacccaacataaaattgcaactctcctctgacattctctatcctgttactctgctttattttcttctatggcatttattcccatctgtcaggcgtaatgttttacttattcatttgtttctgtctgcctcccctctagaatgtgaactccctgaggaaagaattgttcaaatattttgctcctagaacaatacctggtacacaatcagatttaatgaatatttgctgaataaataaatgaactatgggcattaaatatttactgaatgaataaatatgtgttacaggctgagaaaatgggggttgtgaccaactcagtttaccactcgaggctatatgagcaaacagaaaactgttctcatgaaagcaggatgttggaaaactgacaactgcatctgccaccagaaaaggtgctgagggcagtcacgcctcaagcacagtgttccttgtgattatccgaaagaacatctgaagcctgttgtacaaagaaaacaattatatgtacctgtgattaatcaagcagctgatcaaccgttacctctccctccctgctctttctacctaatataaatgaagggctgtagaagctcaaggctgcctttgctcaccagaagcaaggagctccctgacacattctttcaaaacagatctcttgtctttatttctgcattcgtcccccttcattcacttccgtaggaaccgtcagtgacaaatatggatattgttgaaggtgtggagagggaagaaacctaattttttttttttttgagatggagtctctctctgtcacccaggctggagtgcagtggcacgatctcggctcactgcaacctcagcctcccgggttcaagcaattctcctgcctcagcctcctgagtagctgggactacaggcacccaccaccacacccggctaatttttttgtatttttagtagagacggggtttcaccgtgttagccaggatggtctcggtctcctgacctcatgatctgcccgccttggcctcccaaagtgctgggattacaggcgtgagccaccgcacctggtcgaacccttctttgttagacaaaaacttgccagtattcggtgaaattgattaagaataggcctttaggccccttggtcccactcctgtgtgaatggtcaagaggagtcttgtatagatacataagtggcacgctcaaagtgaagggaacctaggtgtccatcactgaaggactgggttactaaacatggtggatgtgtactatgcagcggcgcttctcaaatcctaacatgcactgagtgccctggcaatcttgttatatataacgcagattccgattcagttggtctgggtgagatctaagactccagttctaataagtgattcagaattgctattttctgcaccacgctatgtgaagcaagggcaaaaaccagagtagtgctgttcaatgggacttccagtgatgagatgcaaataattctatctataatatatccgtgctgtcaatatggcagccgctagccacgtacggttattgaaatgttgtgagtatgactaaggaatggaattttaaggtgcatctaattttaattaattttaatcaaaaattaaatggccacaccagttgtggctaacggctaccatattggacaacatatgtctagaagactctggggcagttagaagcagtgaactagatgagcaaatagtgatgcagatagattgttacaagatgatttgacgaaatcagatgacgtatttaataatacaacctgacccctcacctacacctaccttccttcacacactatttaattgaatgtaaaatactgttgattatattgcactttattttgtagaccactcagaaagaaaaagaagttgccaattaaattatgaggtgtaagacatcatgctgaattaagatgtaagatgcttcctaatttcagagatgtgaaaaatatgaaaagaatgtgtctttaaatcaataaaatataatgttcaaccaccatagctggaactttgagttgcaaataaaattaaagtagtctttaaactatttttatttagctttatagaaggatgcaggttgagaattatagcatgagttatatcatgtcactgggtgcccaaatctacccaagtacacaacttcttttctctcctttttcctatagggcttgtatggctgctaagtattaaatccacagtgtgtgtttatcaccttgacacagaaggtgcaacctccacaaactgagacaaggacactataagaaaagaaaattataggccagtatctctgatgcatatagatgcaaaaatcctcaacaaaacactagcaaactaaattcagtagcatattaaaaacatcatacaccatgatcaagtgggatttatccctgggatataaggacggttcaacatgcacaaatcactaagcatgatatacctcaacagaatgaaggataaaaattatatgatcatcttaataggtacagaaaaatcattttgcaaaatacaatatcgtttcacgataaagacagtcaacaaattaggtatagagagaatgtacctcacacaatagaggccatatatgacaagtccacagctaacatcatacccaatggtgaaaacttgaaagcttttcctctaagatcaggaaaaagacaaggatgcccactctagccatttctattcaacattagcactagaagtcctagccatagtaattaggcatgaaaaagaataaaagacattcagatcagaaagaaagaagtaaaattgtctctgtttgcagatgacataatcttatatgtagaaaaccctgaagagtccaccgaaaaactgttagaactaataaatgattcagtaaagttgtaagatacaaaatttggttgtgtttctacaccctaacaatgaattatcagaaaaaaattgagaaagcaactcaatttacaatggcatcagaaacaataaaatgcttaaaaataaacttaagcaaggaagtaaataatctgtacactgaaaactataaaatgctgataaaaaaaattgaagacaacataaagaaattgaaagatatcccatatttgtgaattggaagaattaatatttctaaaatgtcaatgctaaccaaagctatctacattttcattttaatccctatcaaaattccaatggctttttctcacagaagtagaaaaaaaatcataaatatggaaccatgaaagaccctgcaatcttgggcaagaagaacaaagctagagacatcttattgtctgatttcaaaacataatacaaagttatagtaaccaaaacagcatggtactggcacaaaaacaggcatataaccaatgggacagaatagagagctcagaaataaatccatgcatttactgccaactgatctttaacccaaaggaaaaggatattctctttaacaaaagctgttggaaaaactggatacctgcaaggagaagaatgaaattggactcctatctcatgccatgtacaaaaatcaactcaaaatgggttaaggatttaaacataagacctgaaactgtaaaatgacaagaagaagacatggggaaaaaacttcttgacatttgtctgggcaatgatattttagatataacccccaaagcacagacaacaaaagtaaaaataaacaaatgcgattgcatcaaatggaaaagcttctgtgcaccaaaggaaacaaccaacagataatgatcaacagagtgaaaagacagcctaccaaatgggagaaaatatttgcaaatgatgtatctgatagagggtcaatatccaagatatataagcaatgcaaaaatcaacagcaagaaaacaaataacccaattaaaaaatggacaaagggccgggcgcagcggctcatgcctgaaatcccagcaatttgggaggctgaggtgggtggatcacctgaggtcaggagttcgagacctgcctggccaacatgatgataccctgtctctactaaaaatacaaaaattagctgggcatggtggcagatgcctgtaatcccagctgcttgggaggctgaggcaggagaatcacttgaacccaggaggtggaggttgcagtgagctgagatcgcaccactgcactccagcctgggcaacagggagagactctgtctctgaaaaataaaaaagggcaaaggccctgaatagacatttctccaaagaagacatacaaaggaccaacaagtatgtgaaaaggtgctcactatcactaatcatcagggagacacaaattaaaatcacagtaagacatcacctcacacattttggaatgactagtatagaaaaggcaaacaataacaaatgctggcaaggatgtggggaaaaaaagtgaatccttgtaccctgttggttggagtgtaagttggtgcaaggaaatgaaattggcatctcaaagtgatatctgcacacccatgttcatggcggcatcattcatgatgaccaggatatgaaaacaacctatgtgtctgttgatggatgaatggataaaggaaatgtaatatattagtatcagtataatttaatattattctgccttataaaagaaagaaatcctgtcatttgtgacaacatggatggaccgggaggacactgtgttaagtgaaataggtcagacacagaatgacaattactgcatgatctcacttacatgtgaaatctaaaaaactcagactcttagaagcagagagtagaatggtggttaccagacactggaggatggggtgggaggatgaggaaaaggagggagcctctacttcccagcaatctttcgtgcatgtcccagacctgccaccttagggttccccaatactgtgctgtccccatagaacataaggtgagtacaacattctattttagctatactctgcagtatccaagcacagaactttgagaagacagacactaagatcatgaggtcattcccaggcagacccatccaagggtgcctggtaaaggtttagcaatgactgtccggcaaagccctatctatagtgtttttcaatttcagtgcagtaaatacttcttctttggctattgtcaagctactggtgcagacagagttggggagttggaaagaggtgtgcagaaactcatcattacagacgtagtacaagagacatatctcactcccaagcataggtattagttgaaataattagcaacagttgagttttgagtatttactgacaatttttttaatcaattatgtaattatacgcttatgtaatttaatttttaatgatggctgcatttagcaactggttctcgaaattcctgaaaatttgctggtagactcttgcgagcatgtatgagctggccctggcacacattgggcctgccgcccagcccaagtttattgacctcgttactcatagggactctgctttattttaaaattatgtttatggcttcttgtctgtcatctcctgctagaatataagttctgtgagggcagggattctgactggcttgctcacagttcttcctccagcacccagaacaatgcctggtgtatagcaggtgcctaataaatagaccaatgcctggcccgtagtaggtgctcaatagctgttgatgagtgaaagtaagaaagagaatgagattcctaacacaatggtttcatgtaaattagaaacagtacactgtgacactgccttgttttccaaggatgcagggcactcaaagccatttatgtcggtgcctgtggggagggaggggagcagagccagagatgaagagtggaaataaattaataaaatgagagaagggctttgcctgggcaggaactgaagcctgtgattaactcaactctcctcacctgagatctgattaggaaaatgaggacatcttcatttgcatagaattttccaggaaacaaggcacttagttccctaccctggaccacaggggctccagggaggaggctggtagaaggcagtcatgctcaaggtcactctgcagggctgaggtgtttccgtctagaaacctgatacagtggggtggacgggggactcccaaggaaaaacacgcaaagagggaggcagccacttgtcagtacacagctcctggcttggcatggtggggccactgtgtacatgtttcttgaagtcattaattggatggataaggctgggcgcggcagctcacgcctgcaatcccggcactttgggaaaccgacgtaggcggattgcttggggtcaggtgttcgagaccagcctgagcaacacagggaaacctcatctctacacaaaatttaaaaagtagcggggcatggtgacgggcacctgtggtcccagctactcgggaggctgaggtaagaggatcactggagcccaggaggtcacggttgcagtgagctatgattgcgttacagcatttcaccaggagactgagcaagaccttgtctcaaaaaataaaaagtaaacacatggatgaatgaatacaatttaggatgattccatttttattgtcattatttattcggtttttagagacactaagcgtgttaaaaattgtcgtctttggaatacaatgccggtttaaggggtctgtgctcctgccctctgtgcctccggtcttgagtagtgatggtgacacagcaagggtgggggcttggtggggagaaaacgcctgaagcaactgctctgggaaaggagagatcagagccggagtaaagatcaggatgctggggactggggctcctgggtctgagggaggaggggctgggcctggactcctgggtctcaaggaggaggggctgggggactggggctcctgggtctgagggaggaggggctgggcctggattcctgggtctgagggaggaggggctgggggcctggactcctgggtctgagggaggagggactggggcctggactcctgggtctgagggaggaggggctgggggcctggactcccgggtctgagggaggaggggctggggcctggactcctgggtctgagggaggaggggctgggggcctggactcccgggtctgagggaggaggggctgggggcctggactcctgggtctgagggaggaggggctggggcctggactcctgggtcctgagtagagagaggagggcctgggcagctgacgaggtccatcccaccgtgaagaccatcatttgtcccgcatcgtttcctcaatccagcttctgtacttgcacaggttggtgtagacaccggggtagccaggcagggcgcagcgctccattccccaagacacgaggccctggagctgtcctctgcacaccaggggtcccccagagtcaccctgagggggaggaacagaaatggagacactgatggacaggtagccagagccaccatggcacagagaacccgagaagcagacacagggagacaggcagagacactggtggacagttagggacacagtcctgccccagctctgaggtctcagccccggaggtcggggcacttccttccctctccgctgggtctggctctgtctctgtgtgcacctgcctgtcccttgaatctcaccaggcccctctctgttcgctccaactgtagaacatttgtgtgtctctctttttctatttccccatctctgcctccctcaaggatgcattaagatttctagaagcctcagcacagcctttcccagacccatatgagcagaggccactctgcgatctttccccaacctgcctcatcccattccaccaactaccctaagagggttactcccacctgacagatgaggaaactgaggcatgaatgctctgagtccattacccagggggcacagggctaggaagcagggtggcctggctatcggaatctctctgtgcctgcggttcactctcttctgaagacctctgcagacttccatgctcctgacatcatttgcttaaatcccagtcccaaataatccctaccacagctcccatcctgggccttacctgacaagagtccttcccgccctggggaactcctgcacagaccatgccaggcgtgatggttctaggataggccttctggcacacctcatccggggagatgttgatgttcacgcattgcagagaggcggggtacctggctgggggacactgcagggttataactgggtctaccctcccataagacccaagggtccaggcccccagcccctcctccttccgacccaggagtccagccccagcacctcctccctcagacccaggagtccaggcccccagcccctcctccctcagacccaggagtccagacccccagtccctcctccctcagacccgggagtccaggtccccagcccctcctccctcagacccagaagtccaggcccagcccctcctccttgagacccaggagtccaggctccagcccctcctccctcagacgtatgagtccaggcccagctcctcctccttgagacccaggagtccaggcctcagccccctcctccctcagacccaggagtccaggcccagcccctcctccctcagacccaggagccccagtccccccagctccacctcctggagacccaggagcccaggcccagtcccctgctttccaagacgcaggagtcctcaccgatggggctggatatagttccccagcctgacactcggcaggaggtcccggggctggcacaggcctgggtgacctcaatgggcctgactgccctcccgatccgtgcgggctgctgtagctgcagcagcatgaggtcgttgtcgtgggtccgggagttgtagttggggtgcgtcacctgacgaaccacgcgcagcacctgctgggtggcctcccacctcctcaggttgtgcttgcccagggcaacctgaaggatcctggccacgacccccaagagaagcgctgctcagggtctgagccagagactcctccccaccctccagcccggttccctggccgggtgacgagtcttccccgaggtctagcctgcttctcactaactgcaggccgagcattcttggcctcctgtgcccttccccatggccagggcattctctcggcccagccccagctgcctctccttccgctcttgggctgggctccagctcctggcttgggaagaaggtgatgattgggagagcttggctccgtgccagggtctgtgctgggctcggtgcattgagtcctaagcgaaactgcgttatgagtctaggctctaaatcggaactgatattccggagtaggcaccattctgtttctagcctgggttctgagttctagacatcttaaacttttgactctatgctaagatcaggattctagatcgaacctggattatgacttgatttatttatttattttttttttgtgatggagtctcgctctgtcacctaggctggagtgcagtggcacgatctcagctcactctcgacctccaactcccagttcaagtgattctcccgcctcagcctcccaaagtgctgggattacaggcgtgagccaccgcacccagcctctacaggtctgtttcatattggattatagggctcttggttctggactctggccctagcccttgacctcaggttgggctctgggttctagttggagctctaggttatggcccggatccaagattctagagtctggtttgcattctggcctttatattctagactctggcctgagctttgatctctaggttctagactgacctgtttatggcatagatatggcttataggcattttgacctcttggctggggtctgggttgtaagttcagatctagaatttaggaggggtctaggttttatatggggcttctgattaggatctgcattctgggatttattgattgattgattgatatggagtttcgctcttgttgcctagcctggagtgcaatggtgcgatcttgactcactgcaacctccgcctcccaggttcaagtgattctcctgcctcagcctcccgagtggctgggattacaggcatgtgccaccatgcctggctaattttgcatttttagtagagacagggtttctctatgttgctcaggctggtctcgaactcctgacctcaggtgatctgcctgcctcagcatcccaaagtgctaggattataggcatgagccaccgcacccgccacattctgggattcaaacactgggttgaagtctgctcatagcggagctatagactagactctgaactaaaccttgggtgtgaaacagcctccaggttttgcctctattcttagagttgtatgttccagctgtgagcagcgttctagttctggatttatggctagactgcaggtcctgaactgggctctgagttctacgtagtgtcctgagtttctgaatgtagacggggtcctgaattcagccaccaatctggaatgggctaagcttggtctcgatgtaatgtgtggcctctggaagaatcactggatcagatgttcggttctcagcaggtccatgggttccaagctgcccatctgctttcagaacctatgctgagttcgagatttatggaggagcccacatcccgagctgtgtttttgttccaggctcttctctagacctcaaaccaggagccagccactacattgggttctatacagagatccaggttctcagctcagctctagggctttagactctggaattcactaggtacagggacaggggagggggtcacttacgggcggccgcagtgagcagcagtgatgacccactggcctgaaagcagggcgcctccgcagaggaagcggcgcctgggacccgccagcagggccgcctgccacggctgggagctccgggtgcacgtatggccaccaattatcttgttctcatcctcttggctctgtgtcatggctaggagtggacaggattgggtggggaaagtagatgagcaaacactctccactccacaagtttgtaggattccaaaactgacaaatccccttccttttggtctaacccctaaactgcccgcctctatctgtcccacccagggtgagacatgcccaatattgaccccgttattgccccagcacggagagctttctgactcacctcccaagtcacctccgtagcatctcttattttgtgccgtggccaccttatccagggccttgctacatctacgacccttagctctatgctcccataatttctgtgatcacttctcgaaatatgccacatttccccccaatgagtccttccccaacacattcaaggacctccctgtctcctccccaacgttcccactcagtgggaccccaaggatccgccatctcttgccccacacttgcccccatccacctcacacacccatgccacgatcccgccaccccatgccacgatcccgccatcccatcatccttctccaccttccctctgacaacaaaacatctttctgacattgtttctttcctaacacagtcaggtagagccccgtgatctttctgctatgacccactcaggacctaatagttccctaagattccttatgtattttgcaccagaccttataaacacctctctccccggccccacaattccctagcacctccacaactaggaatttaggcctccagcacgttcccccaccatgacccccaaaccactccctgctctttcttatgaggtcaccatgagcatccaggggccccaaggacccatccccatctcttctcagagtctccaggggacccccttgtgtcatacccaaccgttctcttacctatagccaggacttgaagtgctgtcagcaggaggaacattttaggggctgagggccaggtcctgtcaaatgcagagaaaaagtgagagagaaggaaccttcaacagaaccgggggctgagaggcagagacagcaaggggcacttacccagagcccaagaccctcagggacatgaagacacagcagagaggtagggaccagagacgaggggggcggggcctgcaggctctgcgggcggcaggtgggaggatgtggagcagggcacaggtccctccttgatgtcttgatgaaggaaggaggggaggtgtctctcttcctagtcacactggcaaagccttttatccctggtaaggacagctggccctgcccccacctcccgccgccctgcttctgacatttttttttttttattgcctagttcccattccaggactccctgatcccatcccctccctcccctgtctggccaaaaaagcagccacaattgttcatgagaacccgcccagggaagatgctataatctagaaggaatcctgggaggggaccccagggcagggtgggcaggggagggttcccagttgctggaggtggtggatctagtggtggagtcaggaaaccagggtggggagtgtcagaggaaagggcacgaaggggctgagagagggaggaagagatggactgagagagggagtcacgggaggagggagagagggagagagagagagagagagagagagacagagagagatggagagagagaaagacagagagacacacagacagagagagacagagacagggtgacgggggggagagagagagagagatggagagagagacagagagagagccagacagagagacacagagagagagagagaaagagagagacagagacagagtgacagagagggggagagcaagagacagagagagactgggaaaatgaatgagaagatatgacagtggagagagaggagtccaggaatacgagcacagaggcaggtgtgctcatgagagaaggaactgaggagagagctggagaaaccggtggaagttggatgtgacagggaacagaagaggcagacggtgggaaaaaaacaagacagaggaagagggagacacagagacgcagggagagaggggtgtggagaagtggagatagaaaagcaaaagacggagggaagaaggtggagatagaatggaaacagacacacagaaagagaaaacagtggagagagaggagagaggccgagacgcccccaccatgcggcactcaccacaaacacacacagaacaacagcgatgatgatgaaggcagtgcgggcatgagacgtggaagagaacgggacatggtgggagaaagaggatgggacaggcaggccgatggcagaggggagacgggaaggatgggcacctacaggggatggggacaatgacagaggagacggaggcctagatgagagatggcagcgccagggagagatggagaggaggggtgggatagaggacgggcaggaggtgggcgggagatacctggacctggagcagagctgcccaccttgctttctcactttcgactcctgagagatgggggagcagaggccccagcagggagcaggaaggttggtgccagaactggcattccccagcttgggatctgctaggtgcagagacaaagtgagagctggagatgcaaagagagagtgacagagacccagagagggggacagagacccagagggagagggagagagacccagaaagagaaggggacagagattcagagacagaaggacagtcttaacagacggggttggaaattcaaaataggagacggcagagagcaggagagacagagtgaatgagatggggaaggattctggccagcctgcaggggggttctggagttgggggggttccatcctcatttgggggagggcctaccctcctcagcccctcccctagccccttaaattccccagtgcttgtgtccgtctctgggcctgggcagccccgtacctggaccacgtggtgactcaggaggctgcttgcctcccttggctaccccaactgttccccggcctcagcctgactcagcctccctccacctcggcacccccctaggctggctctttgagctggagcttggcctgggtctgtctgtacacctggggacgcactgtctgggcacctgcatctggagccacacacccatctctccccaggtgcctttctgtgattcctgaactgtttctgtttaactatgggcctccctgctttgagctgaaggccttgggaagccttcccggcctcctctgccttggttcaggctcggcatcaacacaagaaccccctctttatttttaaatttttaaatttattttatttatttatttattttatttttttttctttttttctttttcttttttttttttttgagacagagtctcactctttagccccggctggagtgcagtggctcaatctcggctcactgcaacctctgcctcctgggttcaagcgattctcctgcctcagcctcctgagtagctggggctataggcacccaccaccatgccccgctcatttttttgtatttttagtaaagacagggtttcaccatgttggccagtctggtctcaaactcctgacctcaaatgatccaccctccttggcctcccaaagtgcaaggattacaggcatgagccaccacacccgtcaagaactccctcttttaagaaagggttctcttgggacccagggatggggtggcaggagggagctgctctgtggtgacgaatcagctttgcactggatgtggcggtgattacacgattctacacatgagataaagagacacagaagcccacgtgcacacacacacgtgcaaagaaatgcgtgtgaaaaatgaacgcgcagtgtgatctgtagtctcattaatagtttggtttctgtgttgatttcctggtttccattctgaacgacagttacacaaggtgtcgccacggggagaagtaggtgagggagattccctatgctgtgtgtgtagcctcctgtgagtctgtaattatctcaaaggaaaaagttaaaaataaaacagaatttcctagtaaacacaaggtctccctgttcctaaaaagaacaccctacttaagcagaaggccttggtcaacccccaggagcctgggagtggctccttcatgccactctatccctgagatccaagagaatcctttctttaaagggtggcaggggggcaggtgctgtggctcacgcctgtaatcccagcactttgggaggccaaggtggatcacctgaggttaggagttcaagaccagcctggaaaacatggtgaaacccaatctctactaaaaatacaaaaaaactgagctgggcatggtggtgggtgcctgtagccccagctactcaggaggctgaggcaggagaatcgcttgaacccgggaggcagaggttgcagtgagctgagattgtgccactgcactccagcctgggtgacagagcgagactctgttgcaaaataaataaataaacaaacaaataaataaagagggggttcttgtgtttatgcagagcctgagccagggcacagaatgactggaaggctccccaaggccttcagctcaaaggtagggagacagctggagatgcagctgatgaggcccagttcaccgccggtggctcccaaggacttgccgtccccagcccggacctcagcacctgccgtgccgtggccaggttgctgggccctcttcccaccacatgctaggttcccagggtatctcgctcaccactccaccacctgcttggcacggtcttgtttgctgtgccacgggcatcgataaacatctgatgaatgaatgaacacagagcctcagtcgctgctcctctgtgaactcacggtctggtgaaacaggccagcggggcaacaggaaactccatctggtgtcacgtgtgctcccctggaggaggctgaggggctggatggagcctcaggtgtgggaaagggttccaggaggaggggcagtcttagcaggttcctgcagatgaataggagtttgccagggaggatggacagtgtgtggagagggtaggagggaggtgagtggtttcgagtagggatggtggggcaggaggatggtgagagagctcagagcgtaggagagaggagtggccaagatgagcagggccctggtgctgcaggggcgagaattttactccgagggtgatgggggatggtggcatgatcctgagtaggggagagcagaatccttcgggatactcaggtctggagctcaggagagtgatggggcatcacggcacggatggtgctggataccagcggtgtggagcccacctagggagagggtatacagtgagaggaccccactgaagactcacagctcagggggtaagaaacagttatgccaggggtaggagtgattgaagagctaagagggacaccaggagggagcagtgtcaggaaagttgagagcttttttttttctttttaaacagggtgtcactctgttgcccaggctggagtgcagtggtgcaatcacagctcactgcagccttgaactcctgggctcaaccatcctcccacctcagcctcctgagtagctgggactacaggcacgtgctaccacagtcagttaatttttgtatttttttgtagagacagggtctcacgatgtagcccaggttggtctccaactccagggctgaagtgatttgcctgccttggcctccccaagtgctgggattacaggtgtgagccactgcgcccagccagagagcattttttaaacgagggagtggcaggggcggtcagatgcctctggaaggaagataggtgatgggtgattttggagagaaaggttttttgtggtgtggtaggggtggaagctgggcggagcagaggagaccataggtgcggacagctcttgggtgtgaggggaggagaagggtggttgatactgatggctgtttataagaaaggaaaacctggatggcacttggaacaaaaacaatcactcacatgtattctgtgctcagcacagccagggactgtgatgaaaccttggttgtttttttttttttttgagatgagtctcagtctgtcacccaggctggagtgcagtggcaggatctcggctcactgcaacttccgcctcccaggttaaagcaattctgttgcctcagccttttgagtagctgggactatgggtgcccaccaccatgcctggctaatttttgcatttttagcagagacggggtttcgccatgttggccaggctgctctcaaactcctgacctcaggtgatccacccgcctcggcctcccaaagtgctgggattacaggcgtgagccactgcgcccggcagatgagaccttttaaaaaatatttaaattttaagaaaattttacaattttttattgttgtaaaataaacacagcataggccaggcgcagtggctcacgcctgtaatcctagcactttgggaagccgaggcgggcagattgcctgagctcaggagtttgagaccagcctgggcaacacggtgaaaccctgtctttactaaaatacaaaagaaattagctgggcgtggtggcgcacgctgtcgtcccagctacttgggaggctgttgcaggagaatcacttgaaaccaggaggcagaggttgcagtgagccgagattatgccactgcactccagcctgggcgagagagtgagactccatctaaaaaaaaaaaaagcacaaaatcaagcattttaaacatttttaggtacaattcagtgggattcagcagattcgcattgctgtgtagccatcactactctctaactcccccagatgttttcattgtcctcaaattctgcacccactaaatgataactccctgcttctcccttccccagcccctagcaacaatcattcgactttctgtctctatgaatttgactactctaggtccaggtacctgacataataggaattggattttttttttttttttttaagagataagtcttactctatcacccaggctggagtgcagttggtgcagtcatagctcactgcagccacaacctcctgggctcaagcgatcctcccacctcagcctcctgagtagctgggactacagatgcacaccactacacccagataattaaaaaaatattttgtagagatggggtctcactgtgctgcccaggcttgtcttgaactcctgggcccaagtgattctcctcccacctcagcctctcaaagtgctgggattacaggcgtgagccactgcacctggccaaaaggaatcatatgatatttgtcctcttgtgactggcttatttcactcaacctaatgttctcaacactcatccacgttgcagcatgtgccaggatttctttccttttttaaggctgattgctattccactgtgtatatagaccacattctgtttaaccagccaagttctttatctgggttagtgtcttccctttcttttcctccctctttcccttcatctctccctcttctcccatctgccttccttttctcccccacctcttttcagcaaatatttatcaagcacctactatgtacaccctcatagttctaggggatacagcaatgaacacaatagataccccttccaaaaaaatctttgccctactgatctgtatattctggaagaaaaagaaaggaaataaatacgatatacgacattacaagttatgagggtctatgaaaaggtggcagcaagggcttccctgcagtggaaggggtctgtaggtttgggaactgcaagatggtcagtggggggccaagtgggtgaggggagaatagacagtgaggatagtgaggtcatggaaagtctggactcctcgggagaggcactaacttgtccccattttacagacagggaaactgaggctgagagaggaggtggcttgtccaaggtcccacagctggtaggtgcaggaggtatcagagactccaggactgtccgaacctccgctccacactgtaaactcttccttctgttgtctcccaaggccactaacaagttcatttgcacaccgatgtgtgtgtccaacacgatttgaacacatttcacgagaattaacttgctgacaccttcccgtagccatgggagagctcatgagtacctccggtattgttactcccctcattgtacagatggaggaagccaagatggagatgctcggccacgtgccaaggttacacaacgctgaacgggggcgccgtgatttgaacgcaggtggagagctctcaaccacctcacgaaatgttcaagaacaaaggagtggatggtgcaaccagcgatgtggtgggattagccccagacatggggaaagactcctcttacattgtttcgggaaggaagaaggaaagggcaggtcaggtgcgggtagggtgtgagcccgatggcaggaagtcgaggctggtccgtcctgtggcttgtttcttccagggagacgtcagtcggctcatctcaaggggccttggtgggtggggttgggaaggctgagggtggtggtgaaggggcccaggtgacgctgaggatcacatgttttaaggggcaccctctcagcagttggcggattttttttttcctccaacttcctggatgtagacaaagagaaggcgcctgcaggactgggtgatggtgggagggatgctgggactggggagctgagggtcgccagggcagaggggactctggggttgcccttgaactcctgggctcaagtgatcctcctcccgcctcagcctctcaaagtgctgggattacaggtgtgagccagtgcacccggccaaaaggaatcatattatatttgtcctcttgtgaccggcttatttcactcaacctaaagttctcagggggtggagacaaggggtgttggtggggaggctgcctgaggagggtcagacgtctttgaggtggaagaacaggaatggcgcagacaaccatgcacagaggcaggggaagctgtggtcagggagtgggaatgtgggattttgtggtttcagaggtggagctcttccagatagagatagaggctgggtgtgactgtgggaacgacggcgggggaggtggtctctggccacgtggaggtagtgggatgcagaagctggggtgtcctatctttggaagctggggggtcctctctcctgaagctccccactccatgtgtcagccagtacccgtctctctgtccacttatcatagcaatggggcaggtcaccaagggcttcacatacatcctctcacatttaaccctcgtgaaagccctgtggggtgagggactcttattactaccacgttatagatgaggaaaccaggccttagacaagtaacttgggcaagtggcacagccaggcctcgaacccagatcatttggctgttaaacaccatgtcaccctgtctgcaaatctgtttccatgtcagcgagggtggggagttctgtttgccttgttccccgatgggtccccagctcctagaacagcctggcatgagtgtgcacacagtgaattgtcgtgggatgagcagacagacccccgtctctgtcttcccttgggtcctgataggctcttggttggcaactttcctagtgtctaccgtgtgccatgtctcccttaattctcccaccagccccatgagacacgatgacactcattttacagatgacgaaatggagagaaatgaggtcagttgtctaacgtggcatggaagggctgggatttgaacccgagccagcctgacttgatgcctctctgcttctgatctcatgtgtgtcattgatgatccaaactctctccgggtaatctctcagacctttccgagccagcactgaaaactgctttgtgccaggcggcctctgtgtgcaaacctgggggcccctgatgctcggctgatggacagtgaacatccctgccccccatcccacctctattacctcccatttatttctttttttttttttttttcttttgagacggagtctcgctctgtcacccagcctggagtgcagtggcacgatctccactcactgcaagctccgcctcccgggttcacgccattctcctgcctcagccccccgactagctgggactacaggcgcccgccaccacgcccggctaatttttttgtatttttagtagagacggggtttcaccgtgttagccaggatggtctcgatctcctgacctcgtgatccgcccgcctcggcctcccaaagtgctgggattacaggcgtgagccaccgtgcccggcccctcccatttatttctgtttaagctccacggtgtaccccaaccttccccctgtgtctcctctaagttagtatcctctccccaggtgcttgggtcaaagacgcttgggagcgtctctgattcctccctcgctctcacctcccattttggcagttcctgtcacttagctccaaagtacacagtaaagaatccacccacttgtctcctctcagtcgccctcttccaagtcacccttatctcccacctacacaggtgcaagagcatccaaactggtctcgctgcttccagcctcgacccccaacccctccctccctcgccctgctaagtccattctctactcagcagccaacgtcttcttaaaacaatatcatgttaaaacctgcttaaaacccatctgtgagtgcccactgcaattataataaaacgcaaatgcctccaaggcacttggtgtctggcttctgtccatccttccaacctcatcactgcattgtgtactgtgcctctgccccctggaacttcttccatcttctcaacattgggaggcgccttcccaacttagaggcttggcctttgctgttccctctgcctgggacatgcttcccaccactctgcctgtgatcttccttcagatttcagcttaaaggtcatctcctgaccaccttctccagagctggcattcccttccagtttccatctcagcttcttgtgggtttccttcctacaccttatctcaatctgtaattgctctatcggtttgcttccttgtttattattattgctggttttcttcctctctatggtgtttattactgtcggatgtctctcatgttttatttatttactttcttactcttacgtctactctgtctcccacgacttgaatggcaaccctgacagtgcagggattttcactgtctttatctgcctctatgccctggcacataggaggtgttcagtaaacctttgtggaaggaagaggcatctcttattagaactgaggcttcacgagggcagggaccttgtctatcttgttgctgaatccctgttgccacgtctgccacccggcacgtggcaggggctctataacaggctgaaggaggaagatcatctcagagcctgtttagaatctctgcttttctccagaatctctgcactcaatgtctccacctcctcagacctgacagcgatctccaatgacccagccccaggagagcacacaggtggaagatggggaagccggtctttctgagactgggctccaaatccctgcagtggggagaatgcttctgacctgatgggatgagacgctggcgtttcgccccactgccacctttagttgtgtttatgtagaggctgtgtttgccaaggccacaggccacagcaaaagtccctttgtccccatgaagactggggcctcctgtttagctaaaggagcgtctgtgttcacttgggcctccagcctcagcagctccctgcccctgccctccatatttaccaagccttcctcctccagcaaaagaatttcccgggtttaccatggccaccggcatatgtggcgaacatcttttttgtttgtttttgttcagtctgcctggaagaaatgtctcttggatttacactgcctttgagaacacgtagggctcttcgcccttaggaaacacaccctcagcattgaatagggttcccagctcttggtgaggacttcttaaatggccctcacatccattctcaccatcctgacaccctcgccactgccccagttttggctaccaaatccattcccagacctttgtcccagccctctccctggcctcctggctgagtcttccctactccagtccttcctggacacggccccagagggatctttctgacacccagagccggccctgtctgctctcgccctccctaagtgccccatcccggccagaagaattccagtgctttatggagggctggccaccccctccaccatcctgcacagggaggagcggcaaagcctcgcagggacttggggctcccatgcctgcaggcctctgtgcctgccattctctctgccttgcacatttgtccccatctcgccctttcctgtgctcattcttactcatctccagctcccggtttacacattacctctttcaggaagcgttccatgacgcaccgcactgagttagaagccccacctcaggcctcccctgtgtccctcctaagccccacggtggcacatatccctccggatcttgacttgccagtatccctgcccgcctccgctggcagacagggagcccattgagggcagggactggggctgactcagctgcattgccccaccgccctgcgcagggcccgccagctccaaggaggcgtcaggaaatgtttgctgcatgaataaaggggtgatcagtatccctcctttactcaaatatcctccatggcttctgcagtgcttagaaacaaagccaagccaaagtcgcttctccctctcacctctctcctccacctgccccctctcctttttccctcaatctcagagtctgcacttgctgtttcctgccaggaacactttcccagagaccctccacccctgtgctctctgcctcaccctgcacctttccctgaatatctcctccttgaagcctccccgtccctcctacttaaatagaagcgattatcacgatccaacataccatatatttgacttatttttctcgtttttttttttttttttttgtatctcccttgagggcatggttttgttctgttcactgctgtcacaaatcacctgctcaaaaagtatttgttgagtggatgacacaggggtcttgaggtcaaggagtgtctggtgtttatacggggccttaagatctctgccaacctgtgtctctcacccttaaggactggctcagagaccagcgggcaggtgggcagagacagctgagctcccagtcggggctggggagggggagacctggctttgatgtcaatgaccaccggatgcacaggcgaggtcacagcgaccccttgtggccagagacgaaaagagcacctcccccccgccccgcttttttttttttttttcttttttttttttgaaacggagcctggctctgtcgcccaggctggagtgcagtggccagatctcgagatcttggctcactgcaacctctgcctccagggttcaagcctcagcctcctgggtagctgggattacaggcacctgccaccccgcctggctaatttttgtatttttcgtagaggcagggttccatctcaaattcctgatctcaagtgatctgcctgcctcagcctcccaaagtgctgggatttcaggcgtgagccaccacacctagcacccccagctcttcagagacccccatgaggaaggccgcaagcccaggctaagagggacggcgagcactcactaaatgccaggcgctcttctaagcactgatatgtatttttaacaataaccacaggacggaagtaccattcctccccacactgtacagccaaagaacctgctcaaggtcacacagcattcccggcagagcttggttctgaactcaggcagtctgggtctaggaagcacattgcaaacctgcgcggtccagtggagtgcccacaggtcccatgtggcagccgaactgtggggagtctggattgagatgggccgaaagtgtaacatacacaccgaattttgaaaactctatatgaaaaaacatgtataaaacatctcgcttaagttttaacaaactgattacatattaaaattataatattttgtataagtgggtcaaataaatttattaaaatatcacttgtgtcccttctctaaaaatacggctatgaaaatattctaaattatacatacggtttgcattttcgattggagagtgccttaaaccacaaaagaaatctaatccactgcccaccccaccccatgcacagggacaaactccaatgaacagaagggaaaaggtcccttacccaaagccacacagtaaatcactggcacgtcagcaataggaacctaggtcccctggcttccagcaggtagcccagcaaaagtgtccagagctccagctcctttgctgatttgctgcagtgtggccctgggcaacttacttcacctctctgggctgtaatttcatcctttatgaaattggtgctgaaggaaccaacccaaatgcccatcaatcaacgagtggataaagaaactgtggtgtatacgtatacgatggactactactcggccataaaaaggaatgaattaacagcatttgcaatgacctggatgagattggagactattattttaagtgaaataactcaggaatggaaaaccgaacatcctatgttctcactgatatgtgggagctaagctatgagggtgcaaaggcataagaatgatactatggactttggggacttggggggaagagtgggaggggaacgagggaaaagagacaacaaatacagtgcagtgtatactgctcaggtgatgggtgcaccaggatctcacaaatcaccactaaataacttattcatgtaaccaaataccacctgtaccccaacaacttatggaaaaataaaatattaaaaaataaaaaataaacttttagattcttctacataccagttaaaaaaaattggtgctgaaaacccattccttatgtcactgagctaatgaggaaggcaggcacacttggcactaggactggcacacaagcgtcatcctatacaattgatcttgatcatcttgcaccccctacagctcattctcctcacagcagctggagtaacttttagaaaatggaaattggacccactgttgggaccaaagccctccaaagacctaccatcactcttaaaatacaagtctttcttgccaacagaagaccatgcacggcccatccctgcttagtggctcgtttcatctcttgctattctcctcctcacccactctgttcccgccacactggacttgctgttccttgcacttgcaagctgattcccacccctccaggcttttgcaccagcagttccctccaccaggaaagctcttcccccaaatggctccatgctttgttcttttgcttctgtaggtctgtgcataacgtcacttcctccaaggcccttccttccctgacccctgtggaaacaagctcttcctgtctctctctctcatcattttttttttaatttgtagcattcatcactacctgacattacatattgatgtgcttgctgtccgtttctcccagactgaacttcatgagggcagagacttgtctcctgttcactgccatgttcctagaacccagaggagtgcctgatgcaaaggagatgctcatacacgttttgagtgaatcatctagtccttggcctccagcccaagtttgggtggccacacagtgaagacaggactgagaagcaggggtttgggagaatactaagccctgggttgggtgatgggaggagagaattgagaagccttctaggaggaccctggaggatctgagcagggtgatgggaagaaggggcatttctgacaagaagccagcccagcaagtcctggaggtgggactgagagcaccatctccccgggaagtttgagattctcacaacctccccgtacctgtacaggacagcaaccctgagacccggcgccccctggtggtcagacagtaacatgaacgaccaagtccaagtggtcaccatttattgagcacctcaacttctctgatcttccatttcctcccagtggtgccttgatgcgggggggatgggggggcgggggggaagggggctgattatattttcataggagaaatgggacatgaaagaggctaagtcaccgacaggctcacacaaccctgcctccagagtccaaggtttggggaacgcatccaacccctcctcacccgtgacagagataccaggagagattcgagaggggatgggtgggggaggaccaattccacgacctgtgatattcgagagctttggagggagccctcggtgtgaccccttccgactgggtgtcttagggccatttaccacttcaggctacagccagtgagaccgtggtggagacgaaatgagggtgcagtgcgtgctacacacgaagcgctggaagggaggcatcgtgacggcggctgtgaatggcgtgtgtccatcaagtcacgctccgcttaccccactgcgggcaaacaggaaacatcaggaatctgatgctcaaggagggtcaggaccatgctgagcgcacccagaaccagcagaggccctgggcaggaggtccccaaccaatccccactcgctcaagaatcacacggtgttcagccccctcctccctgagacccaggagtccacgaccccaggccctccttcctcagccacagatgcctggggtccccagtcccacttcttctaggcttagtcctggccctctcctctctcagacctaggatggtcccccagccccctcctccctcagagcctgaagcccagttcgagacccttcttccctgagacctcgaagtctggggtcccagcttcttcagggtttcaggtgaatgggcccccgtctccttcccaaccccacatggaaggccaggtaaggtaacgggtttattcacagtgtcatttacaggcagcccccaccccgcggcatcagatcccggcgggaggcccgaagtcgctagaaggtggggacggccttggaggcggggggccgggccggatccccgggcgtccccggcgtcgcctcctcgtccagaccccggcggcccttgccgatggccaggcggggccggccgcggttcaggccgtccaggagcgcgcaggcctggcagagcgcgcggctggccagcgccccacagcgggagcaggcgccggggcgcgggggccgcgcggccggggccagcgccaggcgctcggccgagtgcacgaggtccagcaccgcggacggccgcgccgcctccaggcgcttgagcaggtcccgggcgtggccgcggaaggcctcgggcgcgtagacgcactcctcggagaagtagtcgaggcggcggaagtgcgcgtacagcaccacctccttctgcgaggcgaactgcagcgggcggcagcgcggcagggcgcccccctcgccgggagagcccaggcccccgccccgggccagccgccccgcgtcgccccgtaggaagttcatgagcacggtctccgccatgtcgtcggcgttgtgacctggtggggagagaagggagcgggtgaggtggggcgcggagggcgctgctggccagggagccccccggggaaccaagggtccaccaggacccagagagagactgggaggagagacccacggagacccagggcacagtggggccgccaggacccagagagagacggcgacggggagagcaagccatggagacagacccccaaacatggtgtgacagccaggatccagagacagggagggggagagagagccatggagacccctagggcactgtgggcaaccaggacgcagagagagacggggagggcaagagcgagccatggagaccctccgggaaccgtgaagcagccaggtgcaggctgcaggtggacacaacaaaaaatcaaagagaaacataagctcccctggcgcaacttgggcgtgccttcatgtaccacccgcctactgcatagcggaccttatgctagttgccctttcatatagggagtaaaagtgcattatgctgctaataaccttatcagcctcagttaaaaccgtaattcaaactgtacacaaaaatcagaaggcatttaaggcatttaaccgagattctcaggagagctggaggggtaggcaggctgctgtctcccccaccgcctagggaatccatggcctaattctgggaacctgttaatatgtttggttgtaggacaaaggggaattaaggttgcaagttgaattggggctgctaatcagctgactttacaatagggacagaatggtgcgttatccaggtgcgctcaaggtaatcacaaagacccttagaggggaggagggaggcagaaaagggagagatagggccatggagacctttgaacatagtgggcagccaggacccagagagagatggggaggggaagcctgagccatggagcccctctggcaccataggacagccaggacccagagaccgggagagggagatggggccatggagccccctgggcactgtggtgcagctaggtggtggctggaggtggacacagcaggaattgagaggggaacacacacaagctccctggggaacttggggatacctcatttgccacccgcctactgcatatggggggtgtgagggcagaggcaaggttagagtgatgcaaacggtgtaggactcaaactgccatccttggctttgaaaatggaggaagagccgggcacagtggctcatgcctgtaatcccagcactttgggaggctaaggtgggagaatcacctgaggccacgagtttgagaccagcctggccaacatggcaaaacccccatctctactaaaaatacaaaaattagcaggtcatggtggcaggcacctgtaaccccagctgaggcatgagaatctcttgaacctgggagggagaggttgcagtgagccgagatcactccactgcactccagcctgggctccacagcaagactctgtctcaaaagaaaaaaaagaaaagaaaatggaggaagggaccatcagccaggaatgtgggcagcctccggaagctggaaaaggcaaggaaatggacccccttgccccagagcctccaggagaaaggcagcactcttgacactttgattttagcccggtgagacttcccagacttctatctacagaactacaagataataaatctgtgttgtttaaagctgtgaaatttgaagtaatttgttacagcagccagagaaaacaactggttcttgacacagagcctctgacaacccagactgtagtttttttatggtttttttttttcattttgttttattgtgcgtgtgtgtgtgtgtgtgtgtgtgtgtttgagacagggtctcactttagtgcccaggctggaggacagtggcacgatctcagctcactgcaacctctgtctccagggcttaagtgatccccctgcctcagcctccagagtagctgggaccacaggtgtgtgccaccatgcccagctaatttttgtatttctatacagacgcagtttctccatgttggccaggctggtcttgaactcctctgagctcaagtgatccacctgcctcggcctcccaaagcggctgggattactagcatgtgtcaccacccctgtaatcactgcagtgtttttgtgttatctttgtttagaagtaacagtgagaaatatttacacactggtcaccatgaaattgaagctaaacttgttctgtgtcttgtcaagttatacttgagtctatatcagtggttctcaatctgggatgagtctgccctccttccctcccccagagacatttggcaatggctggagacatttctgtgtgtcaggttgggggtggggcactactattaaatagcatctagtgggtagaggccagggatactgctaaaatcctataacacagaggacagctccctaaaaacaaactatctggccccaaatatcaatagggctgaagttgagaggccctggtctatatggtaaaaaacctccaagaacttggctctaattgtgtttgtagtaatggttacctcccaaagacctgccaagccctgtgaccttgagattgggcatgtttgctactgcaaacgacatctcgttgaatgtttattgacttaaagttgtaaaccacattaattaggggagactggatttgctccacaccttgtcattacaaacccacttaagagctcccagttttgtaataattattacaacaattattatactacgcctttgaaaatggagtgtataaacaaagggtagaaatcaccttgcaagtcagggatttttctggaaggcttcattacttttggaagtacaattaataagtgattctatcaaattaactttaaaatccgaggcagcctctcattctttttttttctcccccagctggaatcttgctctgtcacccaggctggagtgcagtggcgtgatctcgactcactgcaacctccgcctcccgggttcaagcaattctcctgcctcagcctcccgtgtagctgggattacagccgcccaccaccacactcagctaatttttgtattcttagtagagacggggtttcaccatgttggccaggctggcctcgaacgtttgaccttgtgattccgcctgcctcagcctcccaaagtgctgggattacaggtgtgagccactgtgcccggccgaagcctttcattctttccatacactgtctgctcttgtatggtaaggattattcttcccattttcaatcacagagatctagggatttctccaaagttactcagtaaggaaagggccacatcagtgaatgaagctcagtaagccttccccagagccagtggccctacctagcatggtggcacatgacagcctcagaactacttttgccttcatatgctttcagtgtgctgattctctccaaccatcatctctcacctccatcaccgcagctggcttcccactgactggtctcctcggctttgtccctgtccctccaacccaggttcctcgccatggcctgggtgagcttttcaaagtgaaactctcttcatgtcacttttactggttccgccacagcctacagggtaaggcctgacctcttccacctctccagcctcccctgcccttgctttctgggttccagccacactggacttcttggggcagcccaaattggcttttcacaggccaataacctctccctaattcttacccgctttacctcttcactgtgagccttcagatttcaaaaccgttccttgaccccactccctccacgtcatagggttctctgtgtgtacacatagtccataacatgtccatacatggtcaataacatgtataatgtttataattttgtacctgataaccatgcaaaggtaggaacttgtgcgtaactgtattctcagccctagcctgacaatgatgatgataatagcatgtataaaatgtgtaatctatattatatcatacgggttatgtaacataactataatatagataacgttatacttctactgactcatctaattgtcataacaagtttatgagctgggtaccattcatagtcctgttttagggatggggtgaaacagaagtacagagtggttaagaactttggtatggccacagttgggatccggcatatagcagaaacttagcatctgtttgttgaaggaatggatgaaaaagacagaataaaaaagttatcttccagcactttgggaggccgaggtgggtggatcacgaggtcaggagatcgagatcatcctggctaacatggtgaaaccccgtctctactaaaaatacaaaaaattagctgggcgtggtggcaggcacctgtagccccggctactcgggaggctgagccaggagaatggcgtgaatccgggaggcagaggttgcagtaagccgagatcgcaccactgcactccagcctgggagacagagcgagactctgtctcaaaaaaaaaaaaaaaaaaaaagttatcaaagaggagaggccaaccaagaaaaggaattaagagatggagatgctttttagagaaagagctggattctgaaaggtggaccataagagatcaagcatgttagaaacatttaaaaataagtaaaggaccagagatctccagagattttcacctcccacccctttggcaatctgtggagaccaagacggtggccaagacccaaaaacctttgtgatcactgcctggcccctctgtctccccagcgtcttgaacctttaaagggccccagccccaaactgcagcatgcgcccttccgcacctccgtacagggatcctcccattaagccaccagggtctcctcgccgccttctggagcatgcgcctgaatcccctttcaggtcccgcctcctcgcctgtgcattcgccccactgcctcggagagtgccgctctgcggcccgtactacgctcacctgtcacgatgtgcgtggctcccacgcggcgcgccccttcctccagcgcccggcgccgcagcactccacagaaggtgcagcaggagcggctgcggccggagccggctgtgctgcgggccacggcgtccatcgtccagcccccaaagaggtcttcgtaggccacgaccgtgagcggcagctcccagcgcgccgcctggcgccgcacggccgccaacgccgcgtcccggtagccaccgatgccctcatcgacggccacgagctgcagtgagatgcccaggcgcggcgccagcgcgcgcagcacgtgcgccagcaccgtggagtccttgccgcccgaggcgcccacggccaccaccgcgccgggcggcagcaggcggccggcgagcaccgtgtgcagcacctcggcctcgaaggcggcgcagaagcaggcaccgcacagcgcttggcccgagagcggacggcggagggcggcgcgtgcagcatggcaggaggcgcacggcggggcgggcattgcgggaggggtcggcttctcctagacagggagagagaggaggtgggttacatatggattccggattgcagggtccctgccatcggggagattgtctggattgcacctctgcccggaatagaccagggagacgtgtgcgcgagtggagtagcttcttctagcgctggggataggatggttataaataggtccggtgtaaggaagccactgccttagggaaggcttcttggattgcacccattatgcaagaagaagagaagtagcttaagaagctggcttcatgggtaaagagagggagcgacaagcaggttatacccaggattaggttgtgtcctctccagagggatgggggtgtatattaaggcccatttgtcacaacctccagggaggccacccttgttacagtcctgatcaggacaaggtaggtatcattggcctgggccaccagggctgttaaaagcccttgggaggtgaggggtttttgactctaagggcagagggaggccaggggactgaagctctgtgcagcgggaggtggaaaacaggaaaggccaactgattgcactttgtagggtgggatacggtctccaggaatgggttctgattgcatcctatgaaaggcagggtgatcaccttctccagggaacacaggcagcctggatcacacctctcaggagaccagctggggttgcacacattttgagggtgagaaaatgggtgggcctccaagattgaactcaaccctgctctggtatcagaatgccccacaagcttctgtgctctcaccaagacatggatcggcccatctttgaccttcatctgttatctttcctacttcattcttccccacccagcctagactccaaccctccagtcaaatcctggtcctgcctgcctggtgaacccataaaaactccccaggctcagttctcctccccaagccaccatcacctccagcctggactactgtagtcacctccttgccattcagagcaggtcacgctgcttctaggatttaccacaatgtgtggaattattttatgtgactatatatttaccatctctaacttctatgagggcagagaccagtaccactcagatgtctaataggcatctcaaaacccaaattcctgattcttctaacccagcgtgcttctcctggagtacagggcagctccatccttctagctgctcaggccaggagctttggggtccaggaccctggactgctctttctctcactgcacttgtcatgctcccagtgggtggcaccaaactgcaatgccaagtccggaccttttcaaactccaggtacctaaatgaaatttagcaaatcctgtttgaatgtagtttcaaaacagccaaacacttaggaccgtctccacggcagcaccctagtctggtctgtctctctcctggacggctgcatggggctccccacaggtctcctgctcccgccttgcctcctctacaaacactccttcacataacagccagtgggatcatgccctgaatcttctcagcatcctcccctggatcccatctcactttagtataataactgctaatggccgatgaggccctacatgtgtggctccttgtttctccaacctcctctccttcagccttgatgtcgtttactctgacacctgaggaatactcctgctccagatgtttgcactggctctcccctctgccctgagtactcttcctgccactgagcccaagaagcagcccttaggactcatctgcagtgaccgtcgggaacatctgtcacaggtgagcagcaactcttggaatctttcttcccccgacttttgactcactccttctgtgctcctggatttcctgctcaattctcttttggggacgcctcttcatgtcctcaggtcctgcctagcacccatctctttccattttttaaagatttttaatttaatttaatttaattttttgagatggagtctggctctgttacccaggtggaatgcagtggcacaatctcggctcactgtaacctctgcctcccagggtcaagcgtttctcctgccttagccacccgagtaactgggactacaggcgtgtaccaccatgcctggctaatttttttttttttttttgtatttttagtagagatgcggtttcaccatgttggccaggctggtcttgaactcctgacctcaagtgatccgcccgcctcggcctcccaaagtgctgggattacaggcgtaagccactgtgcccagcttctttccattcttatgagcgcctctgaatcatgatattcagatgtccctcctggctggtcctccacatggctggggcaccttaaagatgttcagaccctaagcgcccagacaacctatttcttcctcgaaaggcagaaacctgttcttgcccatctgttccctctcttctgagagcagccaccacctttcatccagcccatctgcaggacaggacgtaacgtcaccctggactcatctctcctcaccccctaaatctacagtcacccagtcctggggggtccacgtcctgaggaagggagacgctcgcaggggacaaggctgcacaagttagcagagcctcataggccatgatgtggaattttaggtttattcaggaggagatgggagccttgggaggtttttgaacagtaaagtggtatgatctggcatgttttaaaaggattcctagactggtcaacatagcgagaccccatctctaaaaaaataaataaataaattagctgcacctggtggcacaggcctgtagtaccagctactcaggaagccaaggcaggaggatcacttgagcccaggaggtcaaggctgcagtgagccatgatcgcaccagtgcactccagcgtgggtgatagagtgagaccttgtctcaaataaaaaaagtgggattcgtttggctgctgtgtggggaggactgttggttgtcagggacaaggacagaaggctggaggtcagcacactagacaggagtgctggcagtagaggtgggaagaagtgaaattttggatctattttgaaggtggagcccacaggacttgtataagactgattggagtggggactggggcaacgacgagagaaagtgatgaagggtaactttgaggttctggcctgagcattggagggacggtggggccattttgtgaggtgagaagaccaggaattccatttggccacgtcaggtttgacatgcatgttaagcgtcttccctcaaagactttatggaccctcgtcactgagtcgagcgcctccaccagggccctcagagctgccctgatcctgactagctgtcactggtgacaggtctgtctctctgcttcaaggcagggacagggttggtctggtgccctcgctcccgccgccctgcgcagagtcggtgctcagtaagtatctgtaggatgagggaataataagtgctcccagaagagaggccgcggaccccagggatgcctctggattgcagccttgtcaaaaggacagataatgtgtggcatgggggcggggacaggcagatagtaacataggggcgggggcaagcagatggtcttatcctgtcttggggaagggagtggcccggtaagagacaggccggaccgcagcgttcaaagtgggaatcctggctacaaggcctcagggacacgggcgctgggaaatcacagaggccttacgctcgaagagaccctcaaccctcccacggcaccgcaacaaagagccggagtccacatgccgacccaccgcaggaggaaatactcacccgggcagaactcagtgctgggatgcccacactgcccaccacgcggaagcctggcccggaagtgactccgagactaccactcccataaggtcttggggctttcttgcctagaactcccagaagcccatgcgacacttccgctggatgcgcctacggctccggggtcccgcttggcctacaactcccagaaacacttgcattgctctttctgccgctcccaaaatacactgctccccctccccccgcgtttactttctgcgcctgcgcgcggccgcagggagcggcggagctgcgtgtactgttgtcatggcagcgcgctgtcacccggcaggttgctggatgggcgaagtagttgtattctgattaactgattttgtgggattattataggattttaaggggattacagggcctatgatttctgccctttgaggcggggttgcgggtgggaattgaaggtggaactgcaggggttggtcgctagtgtaaaaggcgcagatagcgcatgcgtagagcagacttcgaggattggagtggaactccgcgcgcacgcgggggctgtcgtgatgcgcgtgctggagacccagactctaaacagaaggatccaaagacccttctcacctaacccaggagcccagaggctcagagactcagacccttgagactaagggggttaaaaacgcagacccctggcaccaaagcacctgagagaaccagtagacctggagacaaccgtctgcaccctagacacagggatctggaggcctccaccctccccacaaggcccaagggtcttgaagaccccggtgactcaaataccggggcacaaggagtttaaggactcagatatctgagacccttgagatccaggtccccaaacctaggtcctcgaaaaaactgaggctcaaaattcctctagacggcgcggtggcttacacctgtaatcccagcactttgggaggccgaggcgggtggatcacgaggtcaaaagatggagaccatcctggccaacatggtgaaacctcatctctactaaaaatacaaaaattagctgggcgtagtggtgcgcgcctgtagtcccagctactcgggaggctgaggcaggagaatggcttgaacccagaaggcagaggttgcagtgagccgagatcgcgccactgcactccagcctggccacagagtgagactctgtctcaaaaaaaaaaaaaaaatcctctagattaagggaccaccagagccttagactgagatgtggagatgtgcagagagccccaggatgtgtaggtctacggccggtgatgacgtgagaaggaaccccatgcaccctgtagcccatttttttcccccataacaggaaaccatgatgccttcctttcatattaaatgagctccgtgaggtcactcttaagccttatcatgggccagttctgttcatctgtgtgcgttggttcatttgttgaatttatttcctgaggtctccttgtgccaggctgcccctgggctaggtttaggtgacacaaatgaatcagacttggttactgtcctctgagcatcccccaccccttacaccaccaccctgtcctcctggtgggggagacagggacttagtcaatatggagtgataaagcttgacatggaagtgttaagagccttgaaagctcaatttcaatcactgccagccagggtgtcagaaaaaaaaaaaattcaacaaaggctgctatgtgccatgcatcatctcagtttgttcatctgtgaaaggggggcaataatagcctgcctcataggatttatgcgaagtcaaattgaattaacaacacctctaaagaatttagaacagcttctggcacatagtatgtgctcaacaagtggttattattctcatctcaattctcataacattaagattatatgttacatatgagttgggtacaactgtaattcttcttcttctttttttttttttttttttgagatggagtctcactatgtcacccaggctggagtgcagtggcgcgatctcggctcactgcaacctccaccttctggattcaagtgattctcctgcttcagcctgctgggtagctggaattacaggtgcgctaccacacctggctaatgttagtattttcagtagagacggtgtttcaccatagtggccaggctggtctcaaactcctgacctcaagtgatcccaaagtgctgggattacaggtgtgagtcagcatgcccagccttgtaattctacttaggtgaggatcttgaagctcagtgatgtcacttccctggactgcctgactctacagcaggggttgcaaacctttcctgtaaagggccaggtagccaatattttaggctttgtgggccacagggtctttgtggcaactctgctgttgtatgttgaaagcagccattgatataagataagcaagtgagggtggctgtataccaataaaactttattgatggacactgacatttgaatttcatgtaatttgcatgtgtcaggaaatattcttcttttgaagaattttgaagattttacaccatttaaagatgtaaaatcatttgtagcttgtgggccatgtaaaaacaggcagcaggcccgatttggctggtggtctctggtttgtagctccttgctcaaagcctgtctccttagtctccaagctgtgcttgctcctggaagaggtgtgaagtgtggcaaaggaggttgagaatttgagggtcgaaatggccttttaatacagaagaaatcgcctgagcaaagaaagatcttgtggcaagaaagcacagggtgccttttgtttgaatgcaatttatgttatctaatcaggttatgcacttaaatgctataaaatggaaacagtgcatagactctacagtgaagtctccctgtcgtctccccccacccacccactgtctagttctcctcctcagaggcagcctctgtcctgcaacaatgtgggagtgcatgctgaatcggggtgtatagagtttccccattctcctctgtgggaccaggataagagtgggatatttggggctccagagatagatgggaaaagaggtgaggtcagccatgagaagccctctcactcccagccctctgctgtctggtttctttcctgtctcccctaacacagtctcccgatcaacaccagtggcctctttattgacaaataaaggtctaacctgggctctacctacttctgagtctctttgccctgaccacaaaatctaccctccctggtcctctttctggccaaaccatgtcaatcaacttgccaggagccttgtactccacagcgctgtcatttctctgcaaactccccaggtgagctcatccactcctgccactcccgcaacttccgtctctgccctgatgcctccccactttcctgcatatctccactgcatcccgagactcggacctgcacagttagcccctggtggtggcactggcatgcttcagcctctaggtgaggatcctgaatcacttcgctgactctttttctcacccactgctccccattgttcagtgaaacttgccagttttgcttcttgaaagtttctcagaccattcccttcatccttgtggccctgccttggctcagctcatccttttttttaaattattcatttatttatttattttttttgagatggagtctcactctgtcaccacagctggagtgcagtggcatgatctcagctcattgcaatcttcgccttccagcttcaagcaattctcgtgcttcagcctccggagtagctgggattacaggtgtctaccaccatgcccaactaatttttttatttttagtagagacacagtttcactgtgttagccaggctggtcttgaactcctgacctcaagtgatctgcctacctcggcctcccaaagtcccaggattacagatgtgagccactgcgccggccgtttcttgcctggactctctcaccccaacctctaatcccttcattcctgaatcctcccacactagccccagatttaaccttgtctctccccttctcgaaactcttccatggctccccattgccatcaggctttccattgtcaaacctctgcagactgcaacggaggtgctgcatgatctggtccctgcacacccttccagcctcagaatgccttgccatctccaggtcatctagctgccatcctaagcaatccgcgtctggtggaagatatggtggctgggctcagctgtctctctccagctctgggagctttggttcctgcagcatcaatgtgcatctctgagggccatttcctatatctggtgcttgttactggcagcacttgcttccccacccctcgaagggctagaagcttccctgggtagaatttctgcatgaagagagttcgttcacccgtggagcctactgaggaacgggatttttgtctgtggttggttggtttgtctgttttcattgtagtgtatcaaacagtccttattttgccctaagtccagctctgtcccactgccttcttgttagtttttgcatctccttactaaatggtaggtctgcctgggttcccacagcagtgctaataaactttgttggccagaggaggcaccaggaaagactctctgttggcaacactctctgaagggccctctgtttctctttggccttgtctctcgttctcctcatcccaggagccttttatgtgagtttccacagctcctcctcgcaccctctcttctctctgcacttctcgtggctccccccgatgtcttgcacaccatgctgttcatcccaatctgctctgagccccagacaaccacatttccccccttctcagtgatggaaccatcatcattatccaaattaggattctaggagtcagatagatatttctctatcacctaccatatcctgtttgcaagatgtcttgcaaacttcccttcctggaataggctcacttcactcccccttcaacatccccatggcctctgctcctagtcatttcatcctcttcctcttctgctcagacctccactctgttttcctctccaacttcttggcctccactctcctcctctccctaaagtctccctcacatcaccccagagggataccttctcccaccaagagctgactctgcccctcccccttgctcttaatccttccatggctccccagtgccctcaatataaagtcaagactttttttgatatgtaagcctgcaagatacggcttgcaactattcttccagagtcatcatgccttgatacctacctctggggtcatttagctgactacctgccccacatttggacgtctctgaacatttgtcacctggtagcccaatccttaagaggggagaaacaggcctgccagtcttgcccttcccctttatctgtttgtgctcagctctggggccctggaaaatgctcctcactcctcattcccagggcaagtctccatctaacatgtagtaataggtgaagacatttttgtctattttgttcaacaagaatcatacctgacatataataaactctcaatatatgtattcaaaaattaaaaaataaagctgttacttgtgaaatctctgcctgtagcccaggtctttgttctgaccccagcaccctcctaatggccccgttgtctgtgaaggcattttcaatgctctccactgtgctagatggtgagcccatagggacagaaattgggtttgttctgactcctagagtgacttggtaaatattgttgatataggataaggctcagagaaacctctgtctcagtttgataggaccccgagaaacaaaactggcaagttggagaatctagctcctttacagccagcagcaagtgaggctactctttgtcctggagggagacattaccccatccctcagggtggctccctgcaaacacaacctgagaactaggccaggtaacgagatctcagaccatcatgttttgggcaatacccaacgagatgtgtaggaggacgggaggctcatggagatctgtccttcccaacaggctgccctactcttcttagatgatgtgggaaactgcaaaatcctctcatcaaattctcttttaccagcatacacaaagattccatcacttgtgatcgacgtcttagtcagtaagtctggaccattttgactggtttccagtcagaaaaccaggaggatgtggtgaacagagaaaccccagtactcacatttcactattctttgctttctctcttcatgctttgtttgaagaagttgcaaaatgagatgactggaagaaagggacatgatagctaaataaagcttccttttcttggtcaggcactataaatctattgcactttctcctgtctaacagaagtcaaacttttcttttttttgagatggagtttcactcttgttgcccaggctggagtgcaatggtaccatctcagctcactgcaacctctgcctcctgggttcaagcgattctcctgcctcagcctcctgagtagctgggattacaggcgcccgccaccacacccagctgatttttgtatttttaatagagacggggttttaccatgttggccaggctagtctcgaactcctgacctcaggtgatccgcctggcttgccctctcaaagtgctaggattacaggcatgagccacaacacctgaccttactattgtaagtattagttctaaaaactggcggcccctcctctgagtccctgtcactccagttctcaatctctctccatatggctcaatgctctcctggaatcattgtcccttcaggtccccattaggatcttcagtcttaggcccattttttccccctatagtttttcctatagtctcattatccttaagtgaacaggaacaacaggacatccagcagagtccctgaggatgaactgggaagcagagaggaagaacataagagaagctcggcctactgatgacagaatctgttgctccccaaatccttttctcttgggcaagccagaccttcccaccagcccatgttatatggctgcccttttggctcgaggcttaggtttcatgctcgtggggtcagacccctctgcagagccgggtaatacctgaactcaggagctgatggtgctgcagttccacggacggacagcaccatccctgctgcccggggcttaccaggtccaccctgtcttggggggacagctatgactttgtgtgtggcccctcctttatctgcatcccagaaaaattctttcaagataaggttggagggaggagagagttcactatatcacagcacataaaggatcggggcagatacacatttctaggtcctcaccctacaatcctagggatgtcacctcaactaccctgatgtgtgatgtcttctgaagctcacgtgatcaccagcccaatgtctcctgtggtggtgcagcagggtgggtgggggagccaggattcccagtccctgtgcccaacacggggtccaaggagggttcaggacttgggatacttagcgcctggttcctggggaccagactgaggaggggacaggaggaattcctcaacccgccttctttgctgttttggtgactgtagaaggatgcagggccaccaccccacttcacctcctacaccgatgtgggaactgttctatttctgtaccagacactccagttttgttgttgttgtttgtttgtgacggagtcttgctctgtcactcaggctggagtacagtggcgccatctctgctcgctgcaagccctgtctctcgggttcatgccattctcctgcctcagcctcctgagtagctgggactacaggcacctgccaccacatccggctaattttgtttttgtatttttagtagagacggggtttcactgtgttagccaggatggtctcgatctcctgacctcgtgatccacctgcctcggcctcccaaattgctgggattacaggcgtgagccactgcgcccggctgagacactccagtcttctagacatcattgcctttcaaggaaacagcacaggtaagaatcttccttcttcggggctggttggaaatggggtcgctgcccacccacatcagaggtggattcgaggctcatatgatgggaaagatgagatttgacaggagaagctctcattccaccacagtcaggcttttgcccacaaaccttcatttaaaaaccatggtcagtccaagatcaccaccaccattctctcagacctcacaagttgaagccttggaaactgagaaatggtagcatcagcaccaaatactcaagaggacagatgccggtggggaatcccaatcccccaggcttctgttctggacctggagcctgagacctctcgggggaaggggcacctcaaacacttgttcttgtggatcgactgtgtctctagttaatagattacaagtgactttatgcaaatttgttagtatagggaaagaaatgcaggctttagaataagagaaacatggattctatactgattcctccacttactaagaggttgaaaatgggcaagtcactttacctctctgtgccgcagtttcctgcttgtaacgtgagaaataacaagccccagcccacaaggatggcgtggcacatgccaatcaccatacccaggtcctggcacaaggggcgggttctgtgtgtgctggtttcttaccccttgaatagtaaggtcctgggatcaacttgtcctgatgctaggactgcaagttccccagtgcattaaatgaatgcccgacatttaaataaaaggagatgaaacttcatcagcaatgtcaaaaccagcaaatgaataaaacatcgcaccacacacttcaaaaggggatcaagtaggaaggacactgaaagatgtggggtggcactaacaactttctccccctgaatggtggggaggagtccccagaagcagctatggaagaaaatttgggctgaattaaccctgagaattttccaagatgcccccgcccccatatgcacatgtgcccactcatacgagtagacaaagctggctaaaataaacaaaaagaattccagagaagaagccttacatactactggggccatatcagaggataaccagaagttaacatcttttaacaccctgttttgagttgaggttattgagaaattccactctaaacaatacccaacataagtgcatatacataccagaagacatgttcatagcagactcctcataatagccccaaactaaaaataatctcaaagtccatctaaaaatgaagagttatgtagtgttcagtatatgcacagaatggagatctttcagcagtgagaatgaatgaattattgacaggtgaaacatcatggacaaatttaacaaacagagattgagcacaagaagccagatacaatggccgggcgcagtggctgactcctgtaatcccagcactttgggaggccaaggcaggcggatcacaaggtcaggagtttgagaccagactgactaacatagtgaaaccccatctctactaaaaatacaaaaaattagctgggcatggtggcgggtgcctgtaatcccagctactttggaggctgaggcaggagaatcgcttgaacacgggaggcagaggttgcagtgagccgagatcgtgccactgcactccagccggggggacaatgcaagactatgcctcaaaaaaacaaataagtaaaaaataaaaagaagaagccggatacaagagtacacactggccgggcgtggtggctcatgcctgtaatcccagccttttgggaggctgaggtgggcggatcacaaggtcaggagatcgagactaacctggctaacacggtggaaccccgtctctactaaaaatacaaaaaattagccgggtgtggtggcagaggactgtagtcccagctactcgggaggctgaggcaggagaatggcttgaacccaggaggtggagcttgcagtgagccgagatcacgccaccgcactccagcctgggcgacagagcgagactccttctcaaaagaaaggagtacacactgaaagttacataaaaacacaatacagacaaaactaatccatgataataggagttatactggtgactttgcaggcggggtaatacctaggaatgggaactggtgaggctcctgggtgtaggttgttgttacaaaaatgtattcatttcatagacattgatcaggcatacctttataattggaacagctttctccatgtatgctttgcttcaaaatcttttattttaaaagactataagaggaagctggacacagtggctcatgcctatagtcccagcaatttgggaggctgaagtgggaggatcacttgaggccaggagtttgagaccagattgggcaacatagtgagatctctgtttcaggaaaaaaaaaaaaattagccaggtgtgagggtgtgcacctgtagtcccagctactggggaggctaatgtaggaggatcacttgagtaggtcaaggctgcagtgagctgtgatcgtgccactgcacttcagcctgggtgacagagcaagaccctatctcaaataaaagactataagagaatacttcacatatatatttgctaattaattttaaaatttacataatataaaaagattattgcaaaaatataaataactgggactgtctcaagaaaaaaaaaacccaaatagttctattgtcttagtccgttttgtgttgcaggttaaaggaatacctgaggctgggtcatttataaagaaaaaaggtttatttggcccgtgattccgatgtctggaaaggtttgagattgggcatctggtaaagtcctcaggctgcttccaatcctagtgggggatgatggaagagggggctgatgtgtgcagagataacatgataggagaggaagcaagagagagggagggaggtgcctgactcagagcttgagcaccgactcactggcaggcaggggcactcatctattcctgaggaatccagcaccatgacccaagcacctcccatgaggccccacctccaacactgggatcaactctcaacaggtttgagggcacaaacctccagactacagcactgatattcatataggaattcattcagtagcaaacactgatttccagggaagaaattcacgggtaagttcttctgaatatgcaaggcagaaatatttccaggttttcatgagcacttccacatgtggaagtctttctgctggcgaaagacacattcgccagcaaactctgaggagtcttttgctttccctagacctcactgaattctgcacagcagggaagaggggaaggctgatctcagaaaacctcccatctctggcagtggtgggtctgacactgcacttatgtgcacgattaccattttgtccaaaccccgtggcttcctgttggggtttacccttgtttctcccagactattcttcccatacggagggactcttgtgaccagactgtcctggggcagtgcctggtgctcatggctcaaggcacagttctgctggggctggtgctgctgccatccaggtggtgagaaagtaagcagacccagaggggtcctgagcggggagcggggtcagtgtctgagcctctccttctctccccaggggctttggcttaggatccaggagatggccttagagtgcaggagctggtgacggtgcaggagggaatgtgcaggcatgtgctctgcgctgttttctaccccaagtattactgggcaggatccggcctagctcatggttactgccaacaggatgaagccactcctggaaggaacactccagtggctacaaacaaccccaaacaattgcaggagaagaaccagggccagttcacctcgttggtcatccccagacctacagctgctccctgaacctcagagatgccaatgaggcggatacagggacgtacttctttcaggtggagagaggttattacatgaaatacagttacggaaatgagaagttgttcttgcatgtgacaagtagaggaaagtcccagaaaaggagctctttctcctcattcggggtcatgggaagcattcaggggccctggggtggggctctggcacagggagtgcccccactcccagaaacaggaatcagcccctttctcttttctagtgctgacccagccacctgagatccatgtccagaagagctgcaatcaggtgaccctggaaatctgacttgcaccgtatcatgggccggtgagaagggaaccccaccaaatttcttctggataagagaagccaccaattttacagtctccaagacccctcttcccgaccagtcctcagttctcagccttatcccacagccatgtgaccatggcagcaacctcacctgtcaggtgaagttcctccgagctggtgtgaccatggggagaaccatccagctcaatgtctcttatgagtggtggatcaggacccccatgcccagggccctgagaacaatgggtgtcaggagggaagggaggtcagaatcaggaattcttttttttttttttttttaagacagagtctcgctatgtcacccaggcttgagtgcagtggcgcaatctctgctcactgcagcctccgccttccaggctcaagcgatcctcctgcctcagcctcccaagtagcagagactacaggtggcaccaccatgtccagctaatttttaaattttgggcagagatgggttctcactgtgtcacccagtttggtgttgaactcttaggctcaagtgatcctcctgcctcggcctcccaaagtgttgggattacaggcgtgcaccactgtgcctggccagagtatgagtttttttgttttttgttttgagatggagtctcgctctgtcacccaggctggaatgcagtgacatgatctcggctcactgtaacctatgcctcccgagttcaggtgattcttatgcctcggcctctggagtagctgggattacaggcacctgccaccatgcccggctcacccttgcctggctcagctttgagctctgtcttgatgcctctcctactttctgccccttgatcctcctcttatgcatggcgtctctcttcccccatttaccccattcaggatgcagcacttcctccaaatgtcacccttttcatccactgtactcatgagccagtgggtgctgtaacttcccttcctgaacaatgtctcccgtcatgccctccttgcttagtcccctgtcctccatcagcatgaccaggccctttgctgtcttttttttttttttttttttgaagatgaagtttcgctcttgtcgtccaggctggagtgcggtggcaggatctcggctcactgcaacctccgcctccttggttcaagtgattctcctgcctcagccttctgagtagctgggattacaggagcatgccaccatgcctggctaatttttgtacttttagtagaaacaacttttcaccatgttggtcagggtggtctcgaactccttgacctcaggtgatccaaccgccttggcctcccaaagtgctggggttacagatctgagccgccgcacccagcctctttgctgtcttgatcattgttccatgcccctccccagcctcccatcttcccttcatgctgtgcccctgatagcacaagcccagaaagaccttcctgtacccagtaccagccccaccccttcctggcccagagtcccctgtgactcctcggcaccctcagtctaagctcctcagctggtcatgccccaacacctccatgtccccttggaagaccccagatatatgtgcaggtctcttcatctgccagactgtttcagagcctttgcacatccctcgtccttcacttgtgatgcctgtctgtcttgcgtcaatatgacccactcccccttccaatctcagttcagcctccttccctccagggtctgtcagctagcgtggactccgggatttgtgtacataagagcatgagccgggccaggcttggtggctcacgcttgtaatgccagcactttgggaggctgaggtgggcagatcacgaggtcaggagttcaagaccagcctgaccaacatggtgaaatcccgtctctactaaaaatacaaaaattaacctggcgtggcggcacatgcctgtaatcccagctactcaggaggctgaggcaggagaatcgcttgaacgtgggaggcggagcttgcagtgagctgagatcacggcactgtactctagcctgggtgacagagcaagactccatctcaaaaaaaaaaaaaaaaagcatgagtcaaacagtcatgtgtcttctgtctcattccgaatgggaggtaagggagaaaccgacctctcagcaccactcttcctgctttctctgtttttttcgtccagccccaaagaccctgaacaatggtacaccactgcctgtcctggagggagagtccctgtggtctgtgtggctgacagcaccccacctcccaaccccgcccggctgagctggtcctgagagggaagaacactgaattcctcccagctctcagcacccgggggcctggagctgcctcagataggggctgggacggaggagcattgacctgttgggctcaccacccactgcgatttcagcacatttccctgagcctctgtgcagagtgagttgcaggacagctgctgaggcaggcagcctagtcgggtgtttgggctgtcagaggggtggaggcctgggaacagaatctcacacgcttctaccctttcccaggaagcccctctggctacagatgtgtgagtgaaaagcaggagggcttctggcccctggttctcacctgatcagggggccatcctgggcactggcttccccccaacccccatggcctcacctggagctactactccaggtgagcaggcctgctcttttctagggaagccgaaggattgttccccgagttccaggtggggctgagctgtcctgtcccgcctgagttagaattgaagtggccgatgctaatctgaggcccgtgttggctctgcaggtgtggagggccccaggggagcagtgctgagaggcctgactgagcccctcctgctcaagacagaactcagatgtggacacccagccctgcagaacagatgcaggacaacactgtcagccatggctcagcccttctgaccattgcagttgagatgctgcaacttcccagggagcgactgggcaaacatgggggcctgaggtattcacggcaacgtgcacagatgataaaactacctagaaaagcatggagaccattagcgttaaagtgaggctggggctgcttcaggaggaagtggggtgtggctgacaggaagtggggtaacaaagaggaggtgttgcggcatccccagtgttctgtttctctaagcatgttcatatgtgtaaaccgctgagattttttcttggggggaagacatttttatctatatggcttatatttctcccaaaaatatttctagaaaactgacatcggtctaaggaggctccaccacacaggatactcccagttcctcccagcccagccacacagttacaaaaaatcttctgctgaattcaggtgcatgtttcttctcccatgaaatcctgcccatcgcggagggtgcatgccccggggctggtgtcctcactccacatctcctgttcaccgggacccctgggagcagagcttgcagaagcaaagccccagggccagctgatccctcatgttctggagtaaccagggaagtgtggctgagcgagacatcggtggtgaagaaacccttcgtggtgcagtgaggaaaggagaaatatcttcccttttgaaatctgccccttttcttccgaatttcctcccttccaagccccacagtacaacagtcacagcctcagtttcccagacctcctgcgagccaggctcccctctgtgtccttggcgtgtatcaacacatagaatcctcacctccacagccccatgtccctctgctcagtcctcctgagattgaacccctgacctacgggagagtgaccccatcctgcctgtgccccccaactgaagctcctgccgtggacagctcagacgtcaggagcctccatgtctcccctccgcacagtgaccccttggggacagtgtccagctctgctgtgttgacctcgttgtgcagaaagggggtgcccacctcgtgcttgcttgggggggatgagaggctgcctgctcaccccacctgcacccccatctctcatggccccaagtcccacctctgagctacgcagatatccacagcctctgactcaggggtctggccagatgggactcattttcaccctgcagaaaatgtcacctaaggggaagggcattgagagggaggcaggaggtggggtgggccctgcatggggtgggaatctgggtgagtctgtctcccgctctggcctcagggacccaggagtgaacatggggtggtggacggtggatctcccagggctgacccgggcctgacagtgtctgggtgtaaagttcctcctctgaggaggtcactgttccgacctcgcccctgtcttcctgtagggcctcctctaagtcttgagcccgcagttcctgagagaagaaccctgaggaacagacgttccctcgcggccctggcacctctaaccccagacatgctgctgctgctgctgcccctgctctgggggagggagagggcggaaggacagacaagtaaactgctgacgatgcagagttccgtgacggtgcaggaaggcctgtgtgtccatgtgccctgctccttctcctacccctcgcatggctggatttaccctggcccagtagttcatggctactggttccgggaaggggccaatacagaccaggatgctccagtggccacaaacaacccagctcgggcagtgtgggaggagactcgggaccgattccacctccttggggacccacataccaagaattgcaccctgagcatcagagatgccagaagaagtgatgcggggagatacttctttcgtatggagaaaggaagtataaaatggaattataaacatcaccggctctctgtgaatgtgacaggtaaggcacaggctccaggaaaggccacagggaaaggtcatgggggcggcagggaaaggctgggatggagcccctgccccaggagagggcttagggtgaagcgagttggctcagggcaggagctggaccagagcctgagctccccccagggctgcaccatggatcctctgacctgatcctgagtccccctctcttcaccagccttgacccacaggcccaacatcctcatcccaggcaccctggagtccggctgcccccagaatctgacctgctctgtgccctgggcctgtgagcaggggacaccccctatgatctcctggatagggacctccgtgtcccccctggacccctccaccacccgctcctcggtgctcaccctcatcccacagccccaggaccatggcaccagcctcacctgtcaggtgaccttccctggggccagcgtgaccacgaacaagaccgtccatctcaacgtgtcctgtgagtgctgggccgggacgcctgggtccctgatggggtgagcgtcaagcctggacactgggtgctgggtcccggaatctgggctggtggtggggtcaggaggacactggctctgccttccctgtttatgcggctcctggggacagacagggccagtgtccccagccctcacagtgatgcgggtctccatgtctttctgtcccagacccgcctcagaacttgaccatgactgtcttccaaggagacggcacaggtaggatggagctccctccctggggctggaggagcagggccttcaggtcaggatggggctggcttattcctcaacctggactcactttggcaaacagggatgtccttgtgggtgaactcagggcccctctgtatccttaggccccaaggccacttgttcccatcctcccatcacctcccttggactcccccacacacccccccctcagcctcaaacaagaagagggtggcattcacacagcaggaccaggctttgaggctccttctcatgtatctcctgaatacatctccacccttatctgtttatttctgatagttctgatctaagtacttctggacaggtgataaatgtccatgggcaaaaattcaaattgcagagcaaaggctctcctccgatgcctgcccccctccccagaaccaaccactgtccatccaggctgccctgagtctcggtttgtacacctggaggatctcagaggtggtttgacgtccgtagtgagactgtccgcaccctcctctagggctgtgtgtgagtccactgcatggatggactctgattttgtggcatctcctaatggaagatcacggcactaatttcatcctacggcaggatagaacaatcttgtatctacttccacaggaatatctaagcctgtgggttaagttcctaaaagcaaaatgtagctacattatatgttctttcttattttgaaagataagcccaaactgttctcgatgaagcggggagaagtttacattcccagcagtgagtggtgaaagtgtgtgtttccagaacttcagtctatgtctgtgtgtcagttgctgtcatcagtctctttctgtatccttcctttttctccagatctatgtatctctctgaccctctgtctctttttctacagtatccacagtcttgggaaatggctcatctctgtcactcccagagggccagtctctgcgcctggtctgtgcagttgatgcagttgacagcaatccccctgccaggctgagcctgagctggagaggcctgaccctgtgcccctcacagccctcaaacccgggggtgctggagctgccttgggtgcacctgagggatgcagctgaattcacctgcagagctcagaaccctctcggctctcagcaggtctacctgaacgtctccctgcagagtgagtgcaccagtatgctggggaggggctggagaggagaacacacctcctccacccttagtaactgctgagcgtggaccttcagagaggagctccgctctggtctgtgctcagctgtgaggtctggaacttccctgggacccacagcaccactgtcctcttcctgccagggaagggttgtggggtggggagagggcaggagtggatctcagaggggacaggatggggccggacaggtgtgtttagggagacaagcgcctttctttgcagggctgaactggagtcacacaactgagatacttgctttgagcatcaaattaaaaaaaagaaaaagcccagcaagtcagcaatcaaatgaaatcatattgcaatgcaataatcttttaaaaaaagtaaaaattgaatgcaaaacaaattcattaatggataaaatattaaaattgtgaaaaaaaaccccaaaaggaatggctggcacttgcacgcctcactggcctcaggaagagtctctccatgtcctgctctctctcattcctgttctttgtgtctggaaaggggaagtggaaatagaagtctaggaccctacaggaagtgggaggagaagagacccaattctctatgatatatcacaaaaataactcccatctgtcaacaggcaaagccacatcaggagtgactcagggggtggtcgggggagctggagccacagccctggtcttcctgtccttctgcgtcatcttcgttgtgtaagcatggaccctagagagggagggagggagagccctgggggaggacaggctggaagctggatccctgaagccagagctggagggacctggatgggtcaagagcttggggcaagaaggaggtcacaggtgcatggtgagaattccatgtgggcctgtgtttgaggagctttgagtctgtggcaaaccttggtacccactgtccaggagaagagagcctctgttctcaaccttggggtctctaagactggaccactgctttcccacctcagtcacccctgcagtcccttaataggaaacacatgggggtacctggtctgcccaccgcaccccaatctgaccacactgaaaggctctctggtctcttcactcagagtgaggtcctgcaggaagaaatcggcaaggccagcagcgggcgtgggagatacgggcatagaggatgcaaacgctgtcaggggttcagcctctcaggtgagtgatgtggactctccacagccagcatgtagcctggacacctcccacaggatgacccccaggactaatcagctgggcgtagccaaagttacctcctctctgttcttcctttcttctctgtagccccaaatcacaatgtttggttggtttcctcccctaagaacagcttttattgtctctgctccctatcctgacccttcattgctgaggcctgaggatctctgtcttttgttccctcacctgtctgcctgtctcctctcctttcctgcctggggggactgtccagaagacatcatcgtccagttcctctgcatttgaacagctgttcccccacccctcaataccgtttagagcagaagccagcaaatactatctgtcagggacagatagaaactattttcggcttcatgggccacacagtctcattgcagctcctcaaatctgctgttgtagcaagaaagaagccatataccctgtgtaaacaaatgaatatggctgtgtgccaataaaactattcacaaacataaagagtgggctggatatgactcagatactgtagtttgacaacccctgatctagagtaaaaatcccaaactctatagcctgcagcagtgcacattctgactttttttgtttttttttttttttgttgttgttgtttttgagacagagtcttgctctgtcgcccaggctggagtgcagtggtgcgatctctgctcactgcaacttccaccttccgggttcaagccattctcctgcctcagcctccggagtagctgggactacaggcgcctgccaccacgcccagctaatttttttgtatttttagtagagacggggtttcactgtgttagccaggatggtctcagtctcctgaccttgtgatctgcccaccttggcttcccgaagtgctgggattacaggcgtgagccactgtgaccggccacattctgaccttttaagcacctacctctccactagggcaagaacaagggtgaagtgagtgaggctgttgcctcaagtgcattttttcgtttgtttgtttttgttttttgagatggagtctcgctctgtcacccaggatgtagtgcagtggcacaatcttggcttactgcaacctctgcctcctaggttcaagcgattctcctgcctcagcctcctgagtagctgggattaaaggtgcacaccaccacacctggctaattttgtatttttagtagagacagggtttcaccatgttggccaggctggtctcaaactcctgacctcaggtgatccgcctacctcagcctcctgaagagctgggattacagatgtgagccaccgcgccccatcctcactgtctgctctgactcacttctctctcccatgtctcaggggcccctgactgaaccttgggcagaagacagtcccccagaccagcctcccccagcttctgcccgctcctcagtgggggaaggagagctccagtatgcatccctcagcttccagatggtgaagccttgggactcgcggggacaggaggccactgacaccgagtactcggagatcaagatccacagatgagaaactgcagagactcaccctgattgagggatcacagcccctccaggcaagggagaagtcagaggctgattcttgtagaattaacagccctcaacgtgatgagctatgataacactatgaattatgtgcagagtgaaaagcacacaggctttagagtcaaagtatctcaaacctgaatccacactgtgccctcccttttatttttttaactaaaagacagacaaattcctacctctctgtaccttggtttcctgctctgtaaaacaggaatgagaagccctacttgcaaggttgtggtcaccattccaggagtcacatcccgttagagctcctggcacaggtgtatgccgagcactgatggatcgctgtgctttgaacacaaaggtcctgctgggaacctctcctgattctggtggcaactagtacttatatgtctgtgtcacttgcctgcaaaatagcgattctgcaactttccaggaaataacctcagcctgcaaatcaggtctaggtagcatctggatcctgcccacctcttcagcctcatctgcccaccctgtgactgctaggccgccttactctctgcagtctacgtattgtgcacagtccagtgggaatctttaggacacactgagctctctccgcactgctcacagcccatccatggctcctggatcctgaacctcccatcacatcctcttcgtgacatcactctcccacttcagtccactcctccatcttcaccacttaacccactggtccctctggtcttttccaaatcatttgcaacatgccctgttggttcatacctcagtccttgcacactggggaccctcctcctagaacgccctcctcctgggccttcttctgtctctgtctttgaaaatggagttcaaggattggacttctgggttgagctgagggagagagtgaagcagcagctcatgatctccctcctctaaagccaaacccagggaatgagaaacgtttccaaaggggcacaggatcatctggcaaattaaacaacatgatccaaaaaaatttacctacatgcagcacccgaacgaggaaagggacatctcacaacaatcactttatgcagtagccctgataggaagaaatcaaaggactggaggaagcactaaaacttccctaaatctagactcttgcccatttacggcagcatcaaaaaaccgtaaagtaccaaggaacaattttttaaaaatcatggccgggcacagtgtctcacgcctgtaattccagcactttgggaggccgaggtgggcagatcacgaggtcaggagatcgagaccatcctggctaacatggtgaaaccctgtctctactaaaaatacaaaaattagccgggcgtggtggcgggtgcctgtagtcccagctactcgggaggctgaggcaggagaatggcgtgaacccgggtggtggagcttgcagtgagctgagatcgtgccactgcactccagcctgggagacagagcgagactccgtctcaaaaaaaataaataaataaataaataaataagtaaaaaatcatatccgagctgggcgtggtggctcacgcctgtcatcccaacactttgggaggctgaggagggcaaatcacttcaggtcaggggttcaagaccagcctggccaacatggtgaaaccccatgtctactaaaaatacaaaaattagccaggcgaggtggcgtatgcctgtagtccttgctacttgggaggctgaggcaggagaattgcttgaacccgggaggcggaggttgcagtgagctgagattgtgccattgcactctagcctgggcgacagagcaagagtctgtgtcaaaaaaaaaaaaaaaaaatcctatgctatggtttggatatggtttgtttggccctgccaagcctcctgttgatatttgatgcccagtgttggcggtggggccaaatgggaggtgttcaggtcccgggattggatccctcatgaatggcttggtgctgtcttcaaggtaatgagagagttctcactctgttacttcctgtgagagtttctccaagagctgggtgttaaaaagacattggcacctcccctccccagcccgtgcttcctctcttgccgtattgtctgcacatgcagacttccttttgccttccaccatgagtggaagcttcctgagaccctcaccagaagcaaaggctggtgccaagcattttctatgtggtgcagaactgtgagccaaataaactgtggggggtgcacggcaacatattcaagcttatgtacaaggcatttgaggtcgaggcatggaaaaatactgaggcaccgtgtgcgtgttgtttgtgcatgagattgaaactccttgaccctgaaaacagggcaaggaacggaatgtgtgataaggagcgcggaaagcagcctcctgagactgtagtctgagtgtttttaccaggccatatgtgtctcatgacccgaccgcaaaaggccatctggtggacattttggtttaacaaaccctttcgagaaacacttggcggacggattctggggcggcactctttcagagatgctgctgccgccgcatcccgctcagctggaattgtctgagtgcttcattcttggcgttcactgcagctacaagctgtataaacctcttttctttataaattacccagcctcagatattactctatagcaacacaaatgaactaagataacacggaatgcttctgtactgatgaatatagaacatttttgagagacttaaggaaggcccaaatgaaggaagaaatatatcacgttcatggattagaaggcaaaaatggttaaaatgtcagttgtctgcatattgatttaggtaatccctgtcaaaattcctatatatatataaaatatatgtatatgtgtatatgtatgtacataagtatagatgagtgtatatgtatgtatattgtaaatataagtttatatatatacatatatagttataaattgataagttggttctgaaatttatataaacacataaaaacctagaataaccaaatcattgtgataagaaacacatttagagaaggcagactttaacactagagtaatacagagagtgtggtgtggactagagtacagtctacaaatggacccacacatatacagtcaactgaatagcatcaagtctattcaattgggacaggaaagacttttaataaatgttggtaggtggtcgggcgcggtggctcacacctgtaatcccagcactttgggaggctgaggtgggtggatcacttgaggtcaggagttcaagaccagcctggataacatggtgaaacaccatctctaccaaaaatacaaaaaaaaaaaaaaaaaattagctgggtgtggtggcaggcaactgtaatcccaggtactagggaggctgaagcagaattgcttgaacccaggaggcagaggttgcagtgagccaagattgtgccactgtactccagcctggcgacagagtgagaccccatcttgaaaataaataaataaataaaaaataaatgttagcggaacaagtgaaattagggttggtaaaaacgagtgttgagctgtttctcacatcacacgcaaaaaattagcctgaagcgaatcataaacctaaaagtaaaagcggagactataatgtttgtacaactgtgctgtttgatatggtaaccactagccacatgtggctactgagcacttgaaatgtcctacatttagtgagaaaataatataaaaatctaagtaattaatatttaaaattgattacatgtttccatgtaacggcataatactcatcaatatataataacaatatataatacatgcaatagcttgaataaattttgaaaacatcttgagtcaaagaagccagatgcaaaagaatacatgctctgtagtttcacttatatgaagttcaagaacaggccaaactaatctacaaagacagaaattcataacagtgactgcctcaggttgggagtgggatttggggattaacgtgaatggcacacaggggaactttctggggtcctgggaattttatttctttcttttctttttttttttttttttttttttttttgagaaggagtctagctctgttgccgggctggagtgcagtggctcactgcaacctccgcctccagggttcaagcgattctcctgcctcagcctcctgagtagctgggattacaggcacgggccaccatgcccagctaatttttgtatttttaatagagatgaccaccatgttggccaagaccaccatgttggccaggatggtcttgatctcttgaccctgtgatccaaccacctctgcatcccaaagtgctgggattacaggcgtgagccactgcgcccagccagtcctaggaatagtctatgtcttaactgggatagtaattatgtggttatgaatcaaaacacattgaatcacgcaaataaaatctatgtattttactgtatgtaaatttacctttcatgaaagagaaattaaaaactcttaaatgatgaaagcttttggttccctcttttttattagactagctagtgatctatcaatcttatttgttctttcaaagaaccaactttggggtatactgatcttttgtaggaattttcgtatctcaattttattcatttcagctctgattttggttatttgttttattctgctagctttggggttgacttgctcttgtttttctaattcctctaggtgtaatgttaagttgctaatttgggatctttctaactttttgatatgggtattctggtacattgcatctttactttcctggatgctaggaccaaactggactagagtaaattacgtggttccttctgtcccaaagaaagatgtatttttaactcaggagctacatcagccccatctggctacattaagcatcccagtctcctctgcgtctcatgctggactctatgcaaaagggacagccagcgaaagcattattgatatgtcaatattgagatgtgagaatttgatcctgtcattatgttgttagctggttgttatgtagacgtgattgtatagttgcttcataatgtcagtgggttatacacttaaccacttaacaccactttctgtggtgtcatgtaacattctttcacttctgtgtttggcactcacttaaggacctcttataagtcaggtccggtggtaatgaatttttttcagtttttgtttgtctgaaagggattttatttatccttcgtttatgaagcttagtttggcagggtatgaaaatcttggctgaaatttgttttctttaagaatgctgaatataggccccgaatgtctttggcttatatgatttctgctaaaagctcttctgttagcctgatggggttccctttgtacatgacctgcctcttccttttagctgcattgaatattttttctttcatgtgaaccttagaaaatctaatgactctgtgtctgggggatggtaatcttgtacagtatcttcctggggttctctgaatttcctgaatttatatgtcaacctctctagcaaggttggggaaatttttgtggatgatatcctcaaatatgttttataagttgctgcgtctctctttttccaggattccagtgggccgtaggtttggtctctttatataatcccatatttgttggagggttttgtcattttttttaattctttttttaaaaatttttgtctgattgggttgattcagagaactggtctttgagctctgagattcttttctcagcttaatctattctgatgttaatacttccgcttgtattatgaaatttttgcagtttttcagctctaacagatcagtttgattctctcttaaaatgattattttatctttcagatcttgaatcattttattggatttcctacattccttggactgggtttcgagtttctcctgaatctccgtgatctttgttgccatccagattctgaattctatgtctatcatttcagtcatttcagactcattaagaacattgctggggagatagtgtggtcacttgaaggtaaaatactctggcttttggatgtgtcagatttctttcactggttcttcctcatctgtgtgggctgatgttcctttaatctttgaagttgctgttctttggatagggctctttgcttttatattctctgatgcccttgagggtttcacagtggtataacttgggcttagacaactgcatttgtttctggatgatttcaaggggcccaggctcaactcagcactcctgagctgcatgctctaactacagggacctgggacctggcccatggcttttttttttttttttcctggcccttcaaggttaagcacctcctatgctggaatggccaaggtgttccgggtccactggcaacaacgctccaataggggttgctgacaaagcattttggcagggtggccatgggtgatgggagttcctgcacgtggtgtgcatcagctgcagggtggccgtgggtcttgcaaatctgcttgctaatgttatgcctaagatcacgttataaaagactaacttgtgcctcattctctctctcgctgtctcttgctttctcactttgatgaagctggaggccatgttgtgagctacctatggaaaagcccatggtttcataacaaagctgattgagtagcaaatgttattttccaggcaaaaaaattaagtggtaagttcttctgaatatgcaaggcagaaataattccagtgtttcataaactctttcaagtatgaaagacatatcagccggggtgactctggggagttttttgctttctctgttcctcactgagatctacatggaagggaagggaaaaacactcgtctctaaaaacctcccacctctggcacccataagtctgaagttgcacttatgtgaggaactaccactttgcccctacccactggcttcctgttggggttactcttgtttttccaagccagttcttcccacgccgagggaacttatgatgagacagccccaggaaagtgcctgacacgtattccctgggctgccccttcccttccacatgcttcctgagtgagcacgtccaccttgtggctcagctgtgagccctgccctgatgtctcccccactttctgccccttgagcctcttcttggacatggtgcctccatcccccacccccgactcttcagttatcccagtcaggacccaggacttattccagttgcctcctgttttcaaccaccccatgcatgagtcaggggttcctgtaaacttcacttccccaaaaatgtctgccatcatgcccttcctcctccctccattccctgtctcctcccctctatctgcatggccaggcccttttcggtcttgacgattgctccatttcccacccaacatcccggtctgcagcctctcgcctccatgctgtggccctcgcagcacaagccctgaaaaattttcctgcatccagagctgacactgcctcttccctgctcagggccctctctggttccctggaaccctcagtccaagctgttcagctgatcatgtcccagcacctccaatttccccctggaagaccccacacatatttgcagggcccttcatctgcccggctgtctcatggcctgtgctttttcccctccacctgaggtgcccttagccacctgttaatatgaccaactcccccactagtctcagctcagcctctttccctgcggggtctttcagctttttgaactcctggatttgcattcgtgagtatgtgtcacacagtcaggtgtctcctctttctgtttttgtggggttgtgggagagacagcctctcagctccaccctccccgctctcactgttttcctcactcaaccctgaagaccctgagcaatggcacctcgcttcctgtcctggagggtcagtccctgggcctggtctgtgtgactgacagcaactcccccgcctcactgagctggtctcaggagggaagaacactgaatctctcccagctctcagcaactgggatcctggagctgccccagaaagggactggaggtgaaggcgacctcacctgtgaggctcagcacccactgggctcccagcacatttccctgagcctctctgtgcagagggagctgctggacgggtgctggggcaggcagcctggtcaggtgttgggctgtgagaggggcctagacctaggaacaaaacctcaccctcttctccccactcccaggaagtccctctgggtgcagatgtgcgagtgaagatcaggagggctcccagcccctggttctcacctaatcaaggggcgctcatgggcactggtttttccttcacccgtggcctcacctggggctactactccaggtgagcagggctgctcttttctagggaagccgagggattggcccccgagttccagatggggctgagctgtcctgtcccgcctgagttagaattgaagtggccgatgctaatctgaggccggtgttggctctacaggtgtggaggcccccaggggagcagggctgagaggcctgactgagcccctcctgctcaagacagaactcagatgaggacacccagccctgcgggacagatgcaggacatcactgtcagccatggctcagcccttctgaccactgagatgctgcaacttcccctcctgggagggagcgattgggcaaacacttaccctttgctggaaatctcaaggcacagcacgggtgctcacaatctgaatacagaacgaatgaatgaatgaatgaatgaatgaatgaaatgtctttccttatctcatgtgagagacttgacagttctttcactctccaagtaacatcagcttcccctgtcccagcccagtctgtcctgggcagacaagattaattaagtggctcctgggcagacattggtgcaggagacagggcccaggagacctgtgtgatttgggcaattcgctttctatctctgtccattcatgctgctacaacaaaataccataaactggccagtttataaacaacagaaattcatttctcacagttctggaggctgagaagtccaagaccaaggtgccagcaggtttggtgtctggagacagtttgcttcctcatagatggtgccttttccttatgttctcatgtggtggaagggctgtgcaaattcccctgggtctctcagatgaggggactaatcccattagactaatcccagagtcctcatagcctaatcgcctcccaaatcattataccttctaatactatcacatggggattcaaatttcaacaaatgaattttgaggtgacatattcagaccatagcacttgtcactgtggaccttgatgtcttcctctccgaactgtggaagtgggagtagagggcttgtcagctcccctgggtcatatgtggttcacaagttcctcctttctacagattctgtggcttccttaagtctctccttcccatttttttttctgattttaattgcaaactggggactgtgggaaagagatgggccatggtctagcccttctgaggcaggaggagcatagaccaatggggcaggagcatagcaaagagaattaaaagttggataaagggcagaataagtaaaagcagagagcagaagcaaggtgaggggacgggtgagcaagaagcaagaggcagaagttgagcagccaaaacaaaaagtaagatagagaagtgagcaaggacacccgtggccagcaggatctggaccaaaccagtaaggggcagttcttcagagctatgcatgtgcattagagagaaaaagtatccttaacatgaccctgtatgataatcagctcattaaagttcatgcatatggactgcatattatccatgtacttaaaattatgggatgggtcaaagtaactaagcaacatacttaaccatcaaaaaggcaggcactggccaggcgcggtggctcacgcctgtaatcccagcactttgggaggccaaggtgggcggatcacttgaggtcaggaattcaggaccagcctggccaacctggtgaaaccccatctctactaaaaatacaaaaattagccaggcatggtggcgggcgcctgtagtcccagctaccagggaggcagaggcagaagaatcgcttcaacccaaaaggttgaggttgcagtgagccaagattgtgccactgcactcaagcttgggtgacttcgtccccacctcaccaccaccccttccccccgaaaaaaggcagacactggatagagatttggcagccttgggaagcgaagaaaaacaaaaaaacaaacaaacaaacataaaaagacccaaagtaatgctgatctcacctcatagagatcagttcgctctccctctccaagagtgtgatactgtgcttaataaactgctgcttcttgctttgctgtctgtgtgtgtctcatccaattctttgtttaagacaccaagagcctggaactgcatggcaccatccggtaacacttctgcccactgagatactgcaaatatccttatggggagagagtggctgggcaaggaggaggcgcccaggaggcagattggtctgcaggatgagatactagctgcaaatgcagggattggaggtgagggcggggagtggcttcggacgcccaaacccagcatcttcctctctcaatcgttacagccaaatgatctctaggttatggacaattaggggacagtgtgggctgagcagatcaatgcagttgtatggaagaaaacagactgggattttctatgtatacaacatcttcaggaaaacctacgtgaagttagaattttcaaggcagcatgtgccgatgataaaactacatagaacagcaggaagactattatcattaaagtgaggctaggggctccttcaggagggagcgggggcatggccaataggaaaggggaatgtaagggtgaatgaattaataaaatctctttcttcatttcaagggacagacttgacagttcttttgtgttctagttcttcaagggtgcttattttgtgtgaatcactgagttggtttttaggggacacttttatgtacatgtcttgtgtttctccccgctcaaaaaaaactgtttcaagaaaagctggcctggatctaagggggctgcagcttgcaggatttttcccacttcctcccagcccagtcacacagtttaaaataatcttctgttgaagtcaggtgcgtgtttcttctctcagaaaatcgcgcccatcactgagggtggacgccccggggctggtgtctttgctccacgtctcctgttcacctgaacccctaggagcagttcctgcaggagcaaagccccagggccagcagacccctcacactctgcactaaccaggcctcatgagatagcagtggtgaagggaaatgtccttgtgctcagagagctgtgaggatgggaatagtgtctgctcttttcatattgatcctttcccttatgactttcctgtctaccaagccccacaatacaacaatcacagcctcagcttccccggcctcctgcaggctgggctcccctccgtgtccttggcgtgtatcaacaggcgcaatcctcaccttcacagccccatgtccgtctgctcggtcctcctgagactgaacccccgacctaggggagagtgaccccaccctgcctgtgccccccactgaagctcctgtcatggggagctcaaacgtcaggagactcagtgtctccccaccacacagtgactccttggggacagtgtccggctctgctgtgttgacctcattgtgcagaaagggggtgcccacctcgtggctgctgagggagggatgagaggctgcctgttcaccccacctgcacccctgtctctcatggccccgagtcccacttctgagctacgcagacatccacagcctgtgactcaggggtctgggcagatgggagttattttcaccctgcagaaaatatcacctaaagggaaaggcattgagagggaggcaggaggtggggtgggccctgcatggggtgggaatctgggtgagtctgtctcccgctctggcctcagggacccaggagtgaatgtcgggtggtggacggtggatctcccagggctgacccagccctgacagtgtctgtgtgtgaagttcttcttctaaggaggtcactgttttgacctcaccaccgacttcctgtagggcctcttctaagtcttgagcccgcagttcctgagagaagaaccctgaggaacagacgttccctcgcggccctggcacctccaaccccagatatgctgctgctgctgctgctgcccctgctctgggggagggagagggtggaaggacagaagagtaaccggaaggattactcgctgacgatgcagagttccgtgaccgtgcaagagggcatgtgtgtccatgtgcgctgctccttctcctacccagtggacagccagactgactctgacccagttcatggctactggttccgggcagggaatgatataagctggaaggctccagtggccacaaacaacccagcttgggcagtgcaggaggaaactcgggaccgattccacctccttggggacccacagaccaaaaattgcaccctgagcatcagagatgccagaatgagtgatgcggggagatacttctttcgtatggagaaaggaaatataaaatggaattataaatatgaccagctctctgtgaacgtgacaggtaaggcacgggctccaagagaggccaaaggcaaatgtgatgagggctttagggcacggctgagacgggacacatgtcctgggagggggccgggggtgatggactcaggagaggagctggaccagagcctgagcttccccaggaccgcaccttggatgcccctcctgatcctgcaggcccctcccctcaccagccctgacccacaggcctgacatcctcatcctgcctctgacgctggcattgtggcatgtggggccttatgactccttgttttggggcctgtcctaggcatggccggggtttagcaccatcccaggcctctccccaccagatgccagaagcacccactccacccatgcagtgagacaataacaattatctccacacattgttaaacgtcctggggggttaagtcctccccagttgagagccttaggtctacacaaccccgtgactctctcaggccaggccagggaggaagcacttcctggcgcaaaccaagggcagcagaggcacctgagcctggacagggagactcagcacacggcccctccatctctcatgccctgaggtcctcggagatccacatttagatgctcaaaagacaggagggacctccacgatggtccagaggccgggagggcaggacctacgtgtctggtgcaggccctggtgctccagggaagcccggaggtaggaggtgggacacggtctcttctcctccctgggtgggtctctagggtctctgagcttcagggtttccttcactctgtgcagagggaaccagttcctatagcatgtgggtttgtagtttctctttcgtgctgggttgaggtctccagctcctctccagcccctctccagccccctgtgggtcccacagccctgcccctcctctccctcccacttctctgctcacacaaggagcccaggaaccctctgtctcagagatgctgctgcctctcttgtgggcaaatgaagagagggacagtcggggctgggctgagcctcatttccccacagcgtcccaggccccactgtcaagatacaggctggaggtgctggagttggtgatggtgcaggagggctagtgcgtctctgtgccctgcagtgtcctttaaccctattacaactgaactgactctagccctgtccatggatgctggtttaagaaagggatcaatatacaatggaataatccagtggccacaaacatcccaaatggaaaagtgcaggagacacggggccgattccacctccttggggacctgaagaccaacaactgctccctgagcatcagagatgccaggaagggggatttgaggaactactacttccaggtggagagaggacagataagatggaattacaaaacgaagcagctctctgtgaatgtgacagataaggcacaggctccaggagacaccacagggaaaggtcatgggggtggcagcgaaagcctgggatggggcccctgccctgggagagggctgagggtgaagcgagttgggctcagggcagaagctgaaccagagcctgagcttcccccagggctgtaccatggatcctctgtcctgatcctgagtccccctctcttcaccagccttgacccacaggcccaacatccttatccccggtaccctggagtctggctgcttccagaatctgacctgctctgtgccctgggcctgtgagcaggggacgccccctatgatctcctggatggggacctctgtgtcccccctgcacccctccaccacccgctcctcagtgctcaccctcatcccacagccccagcaccacggcaccagcctcacctgtcaggtgaccttgcctggggccggcgtgaccacgaacaggaccatccaactcaatgtgtcctgtgagtgctgagccaggacgccctggtccctgatgagggggggacgtccctgagggcagaggatggggtcagggctcgacactgggtgctgggtcccagaatctgggctggttgtgggatcaggaggacgctggctccgccttccccatttatgcagctcctggggagacagggccagtgtccccagccctcacagtgatgcaggtctccatgtctttctgtcccagaccctcctcagaacttgactgtgactgtcttccaaggagaaggcacaggtaggatggagccccctccctggggctgggggagcagggccttcagctcagggcagggccaggtccctcctcatcctggactcaccctggtgatatgagactcccttgtagttgaacccaggcctcctccccatccttagcctctgtggccacctgagcacctgtcctcttccccccactcccctcagactcttgcacacacaccctcctcagccctgcagccaggacagggggaaatacatatagcaggagcagcctttgggcctcttatcttccatctcctgaatatgccacctaactcgtctttttattttacccaatagttttgagctacgttcttttggatacatgctataatcacgtgggcaaaaattttaaattcacagtaaaatgtgtccccagaatcaaccagggtctgtccaggctgtcctgagccttggtttgtgcacctggaagatctcagaggtggtttgatgtcagcagtgagactgtttgcaccctcttctagggatgtgtgtgattccactgtctgaatagtctctgattttgtggcatctcctaatggaagatcatggcactaattttatcctacggcacgaacactgcaatgaataatgttgtatctactcccacaaggaatatctaagtgtataggataaattcctaaaagcacattttaccagtgtcatatgttctttctgattttgaaagatatggtgaagttgtcctcaaataaaggtgggcaagtttacattcccaacagtgagcggtgaacataagtatgtccctgcaccagcctacatcactctctgttccattccccagtctcattctgtatccttcctccctgtttcaatcactttgtctctttgaacctccaactttttctctacagcatccacagctctggggaacagctcatctctttcagtcctagagggccagtctctgcgcttggtctgtgctgttgacagcaatccccctgccaggctgagctggacctggaggagtctgaccctgtacccctcacagccctcaaaccctctggtactggagctgcaagtgcacctgggggatgaaggggaattcacctgtcgagctcagaactctctgggttcccagcacgtttccctgaacctctccctgcaacaggagtacacaggtgggtaagggaggggctggaggaggagaacacacctgccccaccctcatgggccacccactgcccctgagcttcaagggggagctcagctctggtctgtgctcagctgtgaggcctggaacttccctgcaacccagggcactgctgtcctcttcctgccaggaaaggtgtgtaaggcaggaagaggggaggagtgggtcttggaggggaggagctggggcctggacaggtgtgtttggggagacacgtgccttgctttccagtgcctggactagggtgacacaagcaaggcactcacttctgggcacacgactaaaaaacaaaaaataaaacaactcagcaagcaagtgaaataatattggatgtgattatctttattaaaaactaaaaattattgcaaaataatttgacagtgaatacaaatcaaaatttcaaatacaggcaggctgtgcttaccactctcatgcctcagtgacctcaggagttgtcccttcctcctccctcccattcttgccctttgtttctgggaagggggattagggtacccaagttgggggccttataggaagtgggaggagaagagacccagttcttggagttggatcaccaaaacaattccaatccatcctcaggcaaaatgaggcctgtatcaggagtgttgctgggggcggtcgggggagctggagccacagccctggtcttcctctccttctgtgtcatcttcattgtgtgagcactgaccctagggagggagggagagtcctgggggagggcggactgggagcaggatccctgaagccagagctggaagggactgcatgggtcaagagcttggggcaagaatgagctcacgggtgcgtggcaagaatttcaagagcgcccttgtctgtggggctccacatctgtggtgaaccttgggccccaccacccaggaggcaggagcctctgttttcaacactggggtctctgggactggaccaccctcctcccacctcagttacccctccagcgccccaacaggaaatacagggcaggggttggtctgcccactgcaccccgatctgaccacactgaaaggctctctggtctcttcactcagagtgaggtcctgcaggaagaaatcggcaaggccagcagcggacgtgggagacataggcatgaaggatgcaaacaccatcaggggctcagcctctcaggtgagtgatatgggcgtctccacacccagcatccagctgggacatctcccacaggatggcctccaggatttctctgcttatcatggccaaaattatctcctcatctcctcctccttcccaccatccagcttctcctgcaggattccccatcttgctgactgcatgacagtccctcctacctactttctctcgggccaggcatggaggaggagttatctcctctctgtcctccctttcttctctatagctccacattcaccaaatcttgtccatttttcctccctaagaatggctagcattgctcccacccccaccaatcctaaactctctcaatgctgaggcctgaggatctctgtcttggacttcctcacctccctgcctcttgtgtcccctgccctgatgggaggaatcattcagaagccatcactgatcagtttctttgcatctggacagctgttcccacccccaacactgtctagagcagaagccagaaaatactatctggaaaggccagataggaaatatttttggctttctggcctacacagtctcattgcagctcctcaactctactgatgtagcaggaaatcagccgtagaccatgtgtaaatgattagctggctgtgtgccagtaaaactttatttataaaaacaagctgtgggtagaatttgtcccaagggctctagtttgacaagccctaacctagagaaaaagcccaaacttcataactgcagccctgcacattctcgtctcttaaacatctacctctctagcagggctggaattagtgtgagatgagtgaggtcctggcctagcatgcaaaatttaagaaggtgccaaaaatctcagtaattgtgatagttttaaaaaaaactcttattttaggtttgggggtacatgtgcaggtttgttacatacataaactctggtcagaggggtttgtggtacagattattttgtcacccaggtcctaagcctagtaccccacagttatttttttctgttcctctctctcctcccaccctccaccttcaagtgggccccagtgtctgttgttctcttctttgtgttcatgagttctcatcatttagctctcactgataagtgagaacatgcagtatttggttttctgttcctgtgttcgtttgctaaggataatggcctccagctccatccatgttcccacaaaagacataatctcattcttttttatggctgcacagtattccatggtgtatttgtaccatattttctttatccattctgtcatggatgggcatttaggttaatttcatatatttgctattgtgaatagtactacaatgaacatttgcttgtatgtgtctttatggtagaatgatttttattactctgagtataaaaccagtaatgtgattgctatgtcaaatgatagttctgcttttagctcttcaggaaattaccatactgctttccacagtggttgaactaatttacactcctgccgacagtataagtgttcccttttctctgcagccttgccagcctctgtgattttttttactttttaaaagtagccattctgactggtgtgagatgatatttcattgtggttctgatttgcgtttctctagtgatcagcgataatgagctttttctcatatgtctgttggccaaaaatgtctgttcatgtcctttgctcactttttaatggggttgtttttctcttgtaaatttgtttaagttccttatagatgctggatattagacctttgcctaatgcatagtttgcaagtattttctcccattccggttgtttactctgttgatggtttattttgctgtgcaggagctcttaagtttaattagatcccatttgtcaatttttgcttttgttgtgattgctttggcatctttgtcaggaaatctttgcctgtttatccagaacgatattgcctacattgtcttccagagtttttatagttttgagttttacatttaagtttttaacccatctcgagttgatttttatatgtggtataaggaagcagtcccactcaatcttctgcatgtggctagacagttatcccagcaccatttattgaatcaggagtcctttccccattgcttttttttgtcagctttgttgaagatcaaattgttgtaggtgtgtggctttatttctgggctctctattccgttccattggtctatgtgtctgtttttgtaccactaccatgctgttttggttactgtagacttgtaatatagtttaaatttgggtaacgtgatgcctccaggttttctttttgcttaggattgccttggctatttgggcacttttttggtttcatatgaattttaaaattgttttttctagttctgtgaagaatctcattggtagtttgatagaaatagcattgaatgtataaatttctttgggcagtatggccattttaatgattttgattctttttatccatgagcatagtatgtttttccatttgtgtcacctttgatttatttgagcagtgttttgtaattctcattgtagagttctttcacctccctggttagctgtatttctaaaaattttattctttttgtggcaattgtgaatgggattgtgttcctaatgtgactcttggcttggtagttcctgatgtatagaaatactagtgatttttctatattgattttgtatcctgaaactttgctgaagttatttatcatttaagaagcttttgggctgggactacgaggttttctagatatagaatcatgcatctgcaaagagggatagtttaaattcctctcttcctatttggatgctctttatttctttctcttgcctgattgctctggccagaatttccaatactacgttaaacaggagtggtgagagagggcatccttgtcttgtgctggctttcaaggggaatgctttcagcttttccatattcaatatgatgttggctctgcgttcaccatagatagctcttattattttgagatatgttcctttaatacctagtttactgagagtttttaacacgaagcgatgctgaattttatcaaaagccttttctgcatctattgagataatcatgtgtttttgtctttagttctgtttgtgtggtgaatcacatttattgatttgtgtatgttgaaccaacatgaagccgacttgatcatattggattaaccttctgatgtgctgatggattcagtttgcaagtattttgttgaggatttttgcatcaatgttcatcaaggatattggcccgaagttttcttcttttgttgtgtcttcgccagattttggtatcaggatgatactggcctcatagaatgagttagggaagagtcagtcttcctccgtatttgggaatagtttcagtaggaacagaaggaggctcagatctgacatttattgtgtgattgaagagccttccaggcagagggaggagcaaagcaaggcccaggcacaggaagaggaaaggagaggagccatgggacatctgtgtgattagacagagggaggcaggactgagagcaggaaatgactttggaggagttgagcctatgtgaattgtgtctgactgcacaggctactgtgagcatttggagagttttgagcagaaggacatgatcagacgagattgggtccgttcagggtggtatagctgtagaccagaagaacatgatcaactttcattttcatgggattcctctggccactgtgtgcagaagagaccgtgtgtgtggcaggggaaggagagagcataggaggtagacaggaggctggtgaacatcccaggcagaaggtggtgttggctggaaccaagatagcagcagtggtagacatgactgtctcccagatgaattctgcagtggaacctactgggatttgttaatgaattggaattagaatgtgagccacagaaagggagcaagaattacttccagatttttgccctgagcagtgggaagaatggaggtgccaatcattgaggctgagaagattgcagaagaaatggatttgggaaagaaaaggaggagttcagattgaataggttgagttttgtgtgtctttggacaagaacgcgggggtttgaattataccactggatcaaagactatagtcaggagaaaggagtgggctgggggtacagatttgggagtcattagcctattgatggcatgaagccaacacagtggataagatcacaaggcaaaggtaaagaagaaaagaacccggggctgctctgatatttaaggtcagggagacctgaagcaattggcaaagaggttgccaagaaggtgaggtggacccagaaaagcatgatgtcctatagttgagtcaagaaggccttctgtgtagggaaggtgagcagctgggtcctctgctgctgaaaagtccaggaaggagaagactgcaaggtggacatttagactcagccacttaagtggtagtcacagtgaccttgatagtagcagtgcttagacttggtatgtgtgtgaatattaatttgagtaatcaagagagaatctggcaagcaaaatcactgacagttccatggagcatcttctgcacaggggagcagcagggaagggctgcgatgaaggaggaccctcccaggcagcctctgtcactctctgctgtgtgagtctgtattagtttcctgtggctgctgtgacaaattaccatgcatttcctggcttccaacaacacacatggattaaagttctgaaggtcacaaccccaaaatgggtgtcactgggccaaaatcaaggcattggcaggcagggctggttccttctggaggctccaggggaggatgcaatttctcaccctttctggcttctagaggcacctgcattccttggctcaagtcccttcctctgtttgcaaggcaagtagcctggcatcttccaatctctctaagccctcctcctttcacttgtaaggactcctgtcattccactgggcccacccaaataatccaggataacctccccatgtcaatatccttaacctagctccatctgtaaagtccctttagcaatgtaacgtaacagattcacaggtttcaggggattagggtatggacattttggggagcagttatacttcttatcagaggatataatttctttgactgagttgtcctccccataccaccgaactgtgagcttcctaagagcaggtgccccatccaaatcaaggccctgtaattctctctcacttagcctcttcctgcccatcttataattcacacatagatattcgtttgtttgacagtcatttttgccaaattccctcaattaaaaagtgagtttcaggaggtcagggccaacacctactgtgtccaccacagtccatccagcacccggatcagggcttcacacacagagggccccagcaggactccaggctttggggtcagaaggaagggactggattgggtcccggcataacagggagtttgggtacgctactttcttcatggagttgttgcgggaagttaataagattaataaacaccaaacaagttgctcaataagtgttaaatattgcaggaaagtataaatgaaggagatttctataaaatgaacgtgggatagaggcaggaactcatgaagtttaattctatacagaggaatatatccgaaccaaccaaccgatcaaacaacttgtgactctccctgccttatcctatttccactgctctgctctgactctcttctctctctccattcagggtaacctgactgagtcctgggcagatgataacccccgacaccatggcctggctgcccactcctcaggggaggaaagagagatccagtatgcacccctcagctttcataagggggagcctcaggacctatcaggacaagaagccaccaacaatgagtactcagagatcaagatccccaagtaagaaaatgcagaggctcgggcttgtttgagggttcacgacccctccagcaaaggagtctgaggctgattccagtagaattagcagccctcaatgctgtgcaacaagacatcagaacttattcctcttgtctaactgaaaatgcatgcctgatgaccaaactctccctttccccatccaatcggtccacactccccgccctggcctctggtacccaccattctcctctgtacttctctaaggatgactactttagattccgaatatagtgagattgtaacgtgtttgtctctctgtgcctggcttatttcactcaacataacatcctctaagttcatctgtgttgtttccaatgacagagtaatgtactgaataattcaaaatagctaaaagagaggagtttaaatgttgtcaccaaaaaaaaaaaaaaaagataaaaatttgagctgatggatgtgctaatcatgctgacttgatcgttccatggtgcatcgaggtgcgggagcctcacgggggctgcgttcaggtcgctcaggtactcagggcaggactggaatttaatccctgcctgattctgaggtctcttctctcacccggcacccagcactgagtgaagcaaccactgactgggcaccccttagccataagtttgcagcatctccgttgactccatggcctctggtgaaggaatccgagaacctggacacacaggagctgagaaaggaggcgcctgaaattacagcccagctctgcgcatggcctgccccagcctgcatagctctgatcagcagatagagcttccaatggccatgctgcccatgatttcatccccagggccctggttgggtctgcagacctccgccaggagcccccatctccggaccttggtgtgactgggctgggtccctctcttgctggtcccctccagagggaccctggaccctttccagcctcacaggccctatggagaccccagcccttctccatcaccttctcctcacctgcttgcccctctggtcttgtcctcgggtctgaggacatgcagcctgatttgccctatggggagaaatcagggaagaagtcacatctcaggtccataagaaacacgggagagtcctgggtagagaggtgaaggggcccaacttcctgccaagtccaagcccaagccctccccatgtgggaccctaggaggtagaggagatggtctgcggtcttcacctctccactgagagtcctcaacatcctcatacttttaaagatttccaagggcacaggaggcagacgccattgtgtgggggaaagaggccgggtgaagctgaggaaggagttgacactgttggcgcaattaccaggggtaagtaacaacaatgatggagttaataataataatttatttcacactgttatgtcatgccataagacgtgccatcaactctggaaattaggttagttattattacccctgggggcagggagagcagcttgtttatcttttgttattagaggcccaagaatcaagccaagagcttggtgaaatttgtggggagtagagatttgtcatggtcatggagctatgacaaaatcccgtcccatccctgcatctttctaattcctcatcttggagggagctgaggggaacagttgaggccacaggctgtgggttcggcctgcccgggcttgaatcccacctcttctgtgggttagcactgaagccttaaataaaatactcaaactccatggggcttagttttctcacctgtaaagtggaggtgaggctaatcacattcactttctccatagagagacagtgagggtcaagcaggttagaatggtggtgggcacatggtaagtgcacagctaatgtccaccactcttatcccccttatccccctgtgactcaccctgactctgatctgaggactccagaggattcatagaggaggcatctttggacccagacctgagaggactgggagatttcacccagaggttgtgagcatgtcatggcagggtggaggtggcactcctgagggtgggcactgcctagcagggcatggaggcagggagatgtgcagagcatgagcctggacgggagctgctgcactcacggggggcctggatcctgacgtccatgtacatgatcagctgtgtcacggggttttccacagtgcattggtaagtgcccatctgctaccaggccagactcaagagatacaactttgcatatgagaagtttaggaaggagctgttgtggatccagcagtacttgagatctgggaaagaataggagacacactccatttccacctgggagccgatctcagccgtcacgatgccattgaaggcatcaggattgcccctcagcagcagatagtcaggcccatctgcagagacagggaaggaggcctgaggctgtgtttctgaccctttggggtcctgggtaccacctcatgaggtcctcctccagccaagaggttccccactgtgcaccctgagctgacccctagacctgccccaggcaaggcagctgtgccaacaacaataaccataataagagcacctgccatgatcagggacctactaggggccagccccatggtagccctttacctcgtaataaaatcattggagtaaaagcaaacacatggggcctactgtgtgccagacactgttctaagctctgtgcctgtccccacatttgttgaattcccagaacaactcatgtgattggttccactattgatccattttatagatggaaaacaatgaggctcggaggagaggattaggacttcatgactgcaactgacacagaaggattgagccagtctcagggcctgggggcaaccgccctgagcagctgaagcctctggatcctgggtcttggttccaagcctctgacctgtaaacagctgtatggagatcagaaatccttcacgcttcaaccccagcttccacacaatgggcgccatagcctgtgcattaggaaatctaacacaccactaaagtgtttccagaaggagatgtaaaggtgattttagaagtgtgattatttttttcaggtgaaagatgtggaagagtttgataaactctgtgaacacacctggaacactggaagaatctaagtgttgatgtatttataagctcagtagattagatttccaagagctgtccgagaatttgtgaggatcttgctgggttgtgaacttgccccagtaggcagctgaagggctataaagaaaaaagaatgtatggaatgtataactgactctttaaatcaaactctctgtttaagggagcacagtctgttcaatttcagtaaaagagagtgacagtgactatagtaagtttacaagaaaagaagaaagaaatcaatgagtggaatttgaagggtcaaggggtttgaacacttaataaactgaacatcaatttaaaaaataattggttttaagtagtcccctatttacacaaaagcagacctcagcaaaggcacactgaccatttctaatctgagaagtgaggactggggtccctatttcacatttgagtgcatcagttctgagtagtgagggcagctcccaagtccacagagctcaagagctggagctgattccaacccagaccaacctggctgcaggctggcccaggatgtctctggcctagtcccatttgcagatccgtggtgagtcccagaggtggacttgtgtggcaaagagctgaaccctgccaaaaagaggcctggcctttgctctcagctactgggagggaacctctaagtccctggaatgtctcacctgattagagtgtctttgtttacctgaaagccttggacttcaccaaatagtctaataatataactaacgataggactttgggtcactggtatcagctctatctgtggagcagctgaaactaaggtcagccatgtagacagttatccacatctatgtgacaaagccacaccaggacatcaaggctcaggtgagtgtccctggttggcaatgctctatgcatgttgtcacatgtcatgtcaggaggaattaccacagtctatgattctactgggaggggacaactggaaactccccattcggaattccctggaccctgccccatgctcttctcaccttggctgactttaatctgtatccttttgctgtaatgagacatcacatgaggataacagctttcagtgagttctgagtcctactagtgaactatcaaaactgaatgtggtcagggactccccaatgtgcagctggcatcagaagtgagggcagtcttgtgaattgctccctaactactcaggactgctggattaaaggctgtgcaggtcgtttgaggatagaaaggattcctggcaacactgcctggtttgaaccaagcactgccacttacttcccatgtgatctcagttaagttgcctccctcccctaagcctctttctacacctgtaaaatgaagatatgaaatgtttcctcttcatagggctgttgtgatgcttaacttcagaagcaagtggagaacgtaaaacgtggaatccttcttagctaggctcttgtgtctgaggtccttattactaaggaaaaagagggaatgaatactgagaagaaaccagcaaccacggccacagagagcatctcatcagctctatttggctgcaccaacatggagcactccttttagacacagcattgtgccaagtccctgcagaaacatgtccctccctccatctagactgtgcacggccagtgatgcctggtctgaacagtcaggatgaatatggcagaagtggcttcattcagacagagtccgtggcatgaccctgactgtctcatgcaatgagaccctcatgaggaccctgctctcaggaggggggtgtaggcttggagggcacctcgaccttcagggactcactttcattctctcaagcaaaccccagaactatacctggcccatctcatccaggatcccccatgactttgagaatcttgtctgaaaccctgtctctccagtcaggagtggtagcacccagtgctcacctaggggcaggaggcagcttcgggagcagccccccaaagcctttaatctctttctggagctcagctttgtaccttcttatcaagagagcaaaacgtcacagttcctcccagggcaaagttttgcctggcacagccagagtggacactaatgaacagtgactccttcctgtctttcaggcttgaagatcacaaggaatgttaacctgggatctttgaggagctatacacaaggtagatttctgacaggtccctacccgcgtccttgcagcgctgtgtgagcaaaccccatcacccccaaatgcatcacaccaccagggggagccatggagttgcacgatgcatcagcactaatctttgtctacaacctcctgggggaagggataagaagtggatagaaaaggtgagaggcaggagccccgaatcagcttccagagaagatggaagtgaaatggagaaataataataatgacattaacaatagcaataacattactaataacattaaataataactacttcctgtagttatcattcctgttcggtgagattgtaaatcttgacataggttagtctctgaatgggtgggagtcaggtgtcaggaagcatttgggggtcaaagagggtggagaagattggtgcagtgatccctgcaactctctgggtgagcagcagggggcgccctaaccatggcagagactgttgagttggttgcacagacataaccaagtgtcatggggcagtgggaagtccatggactctgtctcagaaggagaattacttgatctctgtgtgcctcagtgtccttatctgcaaagtggacatcagagctcctacctttatgagcctgagaacaaaaaccagggagaataaatgaacaaccacagcagcaacaacaaacaaaaacaagagccaaaaccaagtagcgagatgggcctttctatcatctgaccctgaaatccagtcacatttaaaaccaggtctacccctcagatttcccagacaacagaagtcaatgcattttttccctttgaaagtgaaaaacaaacaaacaaacaaaaaacatgctgtaatattggagggaaacaattatggggtttttttgtgttttttttttttttgagatggagtctttgtcgcccaggctggagtgcagtggtgtgatctcggctcactgcaagctctgcctcctgggttcacaccattctgcctcagcctcccgagtagctgggactacaggtgcccgccaccacacccagctaatttttttgtatttttagtagagacggggtttcaccatgttagccaggatggtctcaatctcctgacctcatgatctgcccgccttggcctcccaaagtgctgggattacaggcatgagccaccgtgcccaactacaactatgatttttatatgaacattaattccattatgtggttccttgaggttgcctgatgtacacattgtgggaaaggccatgagagctgctacacagccctttggagatggcgatcatgaagccagcaaatggtcaagggctgtgagtcttcaaaaatctgtcctgataagtgatgatgtcatctccacatgcaaacctgtctccagagaagacacaatcccatccactcaatgctgccgatcctcctaaacaattcaaatgggctttttgcccagcaagaaagggatttttgtatgtacattcatgttctctttcttattcatcagaagttatttttctacgcacctcacattctcaatgataactaagagaaattccttgtttgattaactcacactctataccggaacatttgtgcatctcacaacggttcccttagagcccacctttccttttgagtttaaaccttccttggagtaatcagaataacttccaaataggaaagaatgaaagagactatgtttattcattttgtacactcttaaaacataaattgtatttttgctagctgcagctaagacttttattttaaaatggggcactaactttccttcctcctacattaaaacatttcagaaaaaaacttaaaatcttaaaaataattttaaatactgggataaatttctttaaacataaatttccaatactttctaaaaaaggtcatatctatttcagaactctaatatcaccagaaccccagagaacatcccccaaatttttaggcataaaaattctcttgtttttcagcagacacttgatcagtttacctgcatccataaccttggatatggattcatatgtcagagtctataagctggaacattaaatacaaaattgaaatgatttattttcttctagctgttccaaaaataaagcatacaaaaactttaaagtcacaaatgtaaactattgtcagaacagaatgttaaacattttttcattattagacatcattattaaatacaaataagtgatgaataatatagaaaataatacttattgtttaagaggcatatatgtgtgatggaaataaaaagtctgcattcatttaagttaggttacatttatttgtggacacaaacaggcccacgtatgagaggagagaaaggcagaggaggggagcagaggggaggatggtgcagactgggtgggccctgctggccacacaggaacctggagcctttaggcagagcagagactagactggactttcactctaacagaacccctcggcttccctggacagaacaggcccaagtgggtcatggcagccacatagaaactggaaaggtgcttgctgggtcctccaggaagagggataggggcttgaaccagggaggcaggggtggcgtaaggatatgcttttggatgtgtgtggaaggtcgtgctcacagagttttctaatggatgtggtcagcgaggggaaggcaagaccaaggatgaagccagaatgttcccctgagcacctggagggaaggagcggtgtccatagaggacttcagaggggaggctttcaggggcgataattctgagaatctcccttacatccaaatgggaacagaacagagacagctgaatgcaaatgcctggagttcaggagaggggtccaagctgaagatgtttcaatgcacagctggagtagtgatgaccacagatgaggtaaggaaggggtgaagacaggcagagaggaggacacacatttgtcattggtgctttcatgacaacatatgttatcttcaatctttttgataatagtcaccctaacaggtatgaggtgatgtctcattgtggttttgatttgcatttccctgatgactggtgatgttgatcattttttctctgcctgttgaccatttctgtgtctttggggaactcgccattcaagtccatcatgccttttcaaatcagattatttgttttcttgctgttgaactcaacttgtttgagttccttatatattctgaatattaaccttttaccacatgtgtggtttgcaaatatctcctccctttccataagtagtctgttcactcttttgtgattgtttcttttgccatgcagaaacaaactaaaacaactttttagtttgatgaaattccatttatctattattgcctttgttgcctgtggtttggtggtgttaacttaaacatcacacaattaccaatttggaagaaagagctttatttcttataaaggattacagcctgcaaggtggccatccagacaggctgggaagcagagcctgcagaagaggctcagagacaagcactttaagggagggaggagaaagacaggaatttaagctgaatgggctggccaagtatacatattcaacaggttacagaaggagctttgaatattcatgaaagggttttgacccaagcatattgaacaaacacgcatgttacatgtaatccatgttcaccttagggtagagacttaccatgtaaacgtattacaattaggccctatatgtcaaaaggtctttggaggacacagcagccctcaagcgcgcagcctctgtaaaacctgccataaccagtccatgctccatgttcttatcaagagaaagttactgaaatcagtcttttgtccagtcacaagggtgtggggtcagtgtctgctggtgagctgtatattgttttaatattacttatattgagaccagtgcttgcttagctaccagagaaaaataaacatattgtggcagttagaacatagtttattctctaagtgtgggggtgtgtaatttaacccctgcctggcatggccttaggttttgtatatgatttggtatctcattgccacagagtctgttctgccagtcttatgatctccatttccatattaaggttaatcagttgctgcatctcaactgcaaaaggaaggggctataatgaggtgtgtctgacctctcgtcccattgtagcagcaactcagtttttaagatttttctggggtccccttggccaagagggggtctgttcagttgattacagggcttaggattttatttttagtttacagtatctaaaaaaatctgagcccagataatgtcaagaagctttttctcctgttttcttcaaggagttttacagtttcaggccttacatttccatctttaatccatattgagttgattttgtttacgtctgagataactggcaatggcagctttgatgaacatgtgtgaaagggtgggggacttgattggaagctcgtttggaaaataaccgaagaaaggaaggtaggaagagtgacgacaaacaacctcttgaggagttttgctgcaaatgttacccacccttggaggggtgagttggccctagtgggtcctttctctgccccctgccacttacgccaatagaatgagaccagaatcggcaaagcggagaagaaactttattcattgatcaagaaatggagaaagggagttcatgtgcaaagcaccttctcccaggggttggtaaaaggggatcttaagggcccttagggcaggtagttggagactgaggcgggcagatctggaaaaaggtgggttccttcaggaggggctgaagtgtgcacactcttgtgttttcttttgtacttggcaccttctgtgcctagcaaggcatagttctcgcccctgagtggagattttagtatggtaatgaagcaagaaatcaggtcaaggcctgcactgaggcaggaatccaggtccaggcagcacgtctgggctgaactcatcccctggctggttcctgttgctggctcccagcctttgtttctggcagcaagcagagctgcaagcacaggttagtttcacaggttttggggcttcctgagagaactgaggtcatgttgcagaaacacaaaaaggaacagagaaatggatctggagaagaagaatttttctcagttcttacccacaatctcccagaggtgctcaaattcatagacaaagaaagtagaaagttggttgccatgggttgggggcaggatgggataggaagttatcatttagttggtatagagtttcaatttggcaagatgaagaaatttctggagatcaatgattaataattgcataagagtgtgaatgtacttagtgccacttacctgtgcactgaaaaatggttaaaattgtaattttttaatgtatattttaacacaaattttaaaaagcactaaatatttgatcagcctcctcgccaaataagaaaaactgatggcaaataatcacatgaaagcattctcaacaccatttgctgctacgaaatcacagattagaaccagaatgaggtagcagtacatacctattagaatggctacaaaacaaaacccaaagaaatttttttttaaatccggataataccaaatgttaatgaaaacgtagagcaaccagaactcatatattctgctggtgggaatgtaaaatggtacacccactttggagaacagtttggcaatttcttataaattcgaacttacacatatgaccaagcacccgactcctaggtatttacccaagagaaataaaaaaactagtgtccacacacagaaatctgcatgtgaatatttatactagttttactttacagtcaccaaaacctaaaaacaatatgaatgttcaccagccagtaaatgtatacaaaatggggatctatgaaaacagtgaggtatgagtcagcaatttaaaaacaacaccccatcacatggacgagccccaaatgcattaaaccaagtgaatgaatccagattttaaaggctacattttgaatgattccgtttatatgacattctttaaaaggcatatcagtagggtagagaatagattagtgtttttacaggaattaaatagggagggacagttgcctaccaaggaacatcaggagggaatgttttaagtaatggcacttggtagtgtcttgactgtggttgtgggtatatagctacatacatctgtcaaacctcaaataattgcatatgagaaatactcagttgatgaaattgatggtacctaaattcaaaatacactagagatgacactacgctctcactagaattgttaaaatataaagactgacaataccaagtgttaataaaggtgtacagctaccggaattctggtgcatggctgggagtagtggtaaaagtcaaagccatttggataacgattctgcaattcctacaaaaattaaatatgcaggtattatttgaactaaaaattccacatcttgtgtataaatgagtataaaaacatgtctataaaaagacttctacttggatacctatagaaaaaacctggaaaatcttaaacgtctatcaataggtgagtaaataaaagataatactacttagcaataacacattgtgaactacaggcatatacaacagcttggctcagtttcaaaaaatgattgctgagtgacagaatacagacacaattttttagtatatttctaggaaattctcaagtagacaaactaactcaccatgacagcgggtatattgatgatttcccagcatacgcgatgggaatggtgagctgcaaagaaacatggaaaaccattagagtggaagaagtgttgtgtatcttgactgtggcagtcacagcggggctgcatacacttatcaaaactcactgaaatgaacatttcaggtgtgtgcattttatttcatgtaaattatgcctaataaagttcactaaatacatccagtgaaattcacatcttcatatttaacattctgacccataaatacaatataatttgctttactattaagaccaaattattgcattcctattatgtgctacattcttatttttagaagaacttacaaggtattatgttacttattaaagactcaattccttatatattaagaatgcaaatggctgtctacattagcaaggacaaatgaacatttacctagataatactgttacaaagattttactaatatatggtaccaaatattattatgccctggattttgaggatttgccagatgagatggaaaatcatgtcactgaacctaaaattatttttatctataaacagaatgggccaggacatttagttgtgtgcttgtcaggaaggtgatagctgggtacagtcaaatctgtgccacaggatctaggaaggcagatttccaaatctcacataagagatcagcacgatcacattgtctgagattttttttttttttttttttttttttttttttgagacagaatctagctctgttgcccaggctggagtgcgttggtgtgatctcggctcactgcaagctctgcctcccgggttcatgccattctcctgcctcagcttcctgagtagctgggactacaggtgcccgccaccacacccggctaatttttttgtattttcagtagagacagggtttcactgtgttagccaggatggtctcgatctcctgacctcgtgatccacccgcctcagcctcccaaagtgctggaattacaggcttgagccacagcgcctggcctgtctgagacttctgacaaacaagagggagcaagagggttaggaaacctgtgaaaaactaaattccaacaagacaattaatgcccaaacaagcaactcacgaaagacaaatagtcataaacataaaaactaagcctgaaattttaattttgtctgtatattcccctcatattatcggaaaatattgtctttgggccacatgtaactgtgagaagcacattttttcatgaaaggaaatgctaatctctatgatgaggaccttaaaaaaatcgctcctgcccacactacactgagaggcagcattaaccgaaaaggagtttcttctacactggttcatagaacatgtgtccttctttatgttttacgtgaagatgctgcatggttcttattttggaggtgtcattgaaactgcaaatctgtatactatttatcagggaaaaattctatagtcacatttctttaaaaatacccaatatgctaccatgacacatggcaaactcatcagtgtccgcagctctaaagccagacagtgtgtgtgtgctaaggacatgaggctatggatagggaccatctcaagggtaggggccaggtcagtgctatctcttcttctctccatccccacctacatacagatgctcactatatatttggtgaatgaatgaatggctgtcaccttcactgcacctaggaccactcttcattttttcagtcccagacactcccatagaccctacagaatcctacatcctgcaggatcgactatctcatggctcaagatgaggctgtgactgtctggggccagaagtgaccagttcccagacgtaaacaatggttcacagaaaaacacttcagagtgagagggttttagacacaggtgtcccatgcttcagatgtccccagaggtcctggtccaggctctggcattggacggaagacccgaggtgggaggcaggaagtggtctctgctccttctctgctcccctctgggcaggtctctgaggtcacttggctttgcagtctccctccactctgtgcagaggcggatgacctctgaccacgtgtgggtttgaggttcctcttctgtgaactgccaagatctcatgctcctccccacagccctcttctctgctcacacaggaagcccaggaagcctctgcctcagagatgctgccgctgctgctgccgctgcccctgctgtgggcaggtgagtggccctggggagaggggccgtggggatgagcccatctgaccctcatgtctccacagggccctcgctcaggatgcaagattccggctggagatgccagagtccgtgacggtgcaggagggtctgtgcatctttgtgcactgttcggtcttctacctcgagtatggctggaaagattctacccctgcttatggccactggttccgggaaggggtcagtgtagaccaggagactccagtggccacaaacaactcaactcaaaaagtgcagaaggagacccagggccgattccacctcctcggtgatccctcaaggaacaactgctccctgagcatcagagacgccaggaggagggacaacggttcatacttcttttgggtggcgagaggaagaacaaaatttagttacaaatattccccgctctctgtgtatgtgacaggtaaggcacgggctccaggagtggcacaaggggaaggttatgggggccactgggaagggctcagatgggactcatgtcctggaatggggatgggaataaagcacgtcaggctcaggggaggaactggaccagagcctgagcttcccacagggctgcaccttggatccccctcctgatcctgcgtccccacctctgtccacaacagccctgacccacaggcccgacatcctcatcccggagttcctaaagtctggccatcccagcaacctgacctgctctgtgccctgggtctgtgagcagggaacaccccccatcttctcctggatgtcagctgcccccacctccctgggccccaggaccctccactcctcagtgctcacgatcatcccacggcctcaggaccacggcaccaacctcatctgtcaggtgacgttccccggagctggtgtgaccacggagagaaccatccagctcagtgtctcctgtgagtgatggggccaggatgcctgggtgcctgagggtgtgaatggggagaggaccaggagagaggaggtccaggactggggccacttggtggctgtgtcttggaggccttgctgagtaggggaactagaaggatccaagctgtcaattgccatttctgcgggcttctagaggagcgcctaccttcatctcactcccaccccaactaaatgagaaatcctctcttgctggcttagatcctctaatgaacccagtgattgaagcctccctagaagacggcacaggtaggacagagtccccatctggaggctggaggagcagggccttcagctcagggaagagctgggctcctgcctcatcctgactcaccatggtaaccagagactccttgttggccaactcagggaccctccctatcctcagctcccatggacacctgagcacctgtctgtagggaccagccccacagggtcggtaggtttttctctcatgtttggagacgagggagttgcagaaataaagacacaagacaaagagataaaagacagctgggtccgggggaccactaccatcaggacacggagaccggtagtggccccgaatgcctggctgcgctgttatttattggatacaaagcaaaaggggcatggtaaagagtgtgagtcatctccaatgactgataaggtcacgtgagtcacgtgtccactggacagggggcccttccctgcctggcagccgaggcagagagacagagagagagagacagcttacaccattatttctgcttatcagagaattttagtactttcactaattttgctactgctatctaaaaggcagagtcaggtgtacaagatggaacatgaaggcggactaggagcctgaccattgaagcacagcatcacagggagacggttaggcctccagataactgcaggtgggcctgacatgagtcaggccctccacaagaggtggaggagtagtcttctctaaactcccccagggaaacggagactccctttcctggtctgctaagtagcgggtgtttttccttggcactgacgctaccactagaccacggtctgcttggcaacgggtgtcttcccagatgctggcgttaccgctagaccaaggagccctctagtggccctttctgggcatgacagagggctcacacgtcttctggtcacttctcactatgtcccttcagcacctatctctgtatagcctggtttttcctaggttataattgtagaacgaggattattataatattggaataaggagtaattgctacaaactaatgattaatgatattcatgtataatcatgtctatgatcttgatctagtataactcttgtggttttatatattttattacactggaacagcttgtgccctcagtctcttgcctcggcacctgggtggcttgccacccacacctgtccgcagactcctccacagactcctccaaacacacaccccttggccccacaataaggacagagtgatattcatacagcaggactagcctttgagccccttatcatctacctcctaaatactcctccagcctcaactttaaatttttcccagtagtttaatgtacttctggacaggtgatacaatcgcatgggcaaaaatgctaaatccatagcagagtctgttctcagatgcttgtcctcctccccagaatcaaagagtgttcatcctggctgctctgagccctggtgtattctctggaaggatctcagaggtcgtttggtatcagcagcacagactatcctcactctcagactgtgtagtgttccattgaagagttggatcctaattctgtatatatcttcttgaaatggaatatcatgtttctaccaacagaaacaaaggattgaacagtcttctatctactttgccagtgtatgtctatgtctgtggaatcagttacttaaagcaaaatagctgggtcttacgttctttctgattttgagagatatggccaaattgttctcagtcaatggtggatatgtttacatccccaacagcatggggtgacagtgttttcttttctttttcttttctttttttctttttttttttttgagactctcactctgtcacccaggctggagtgcagtggcgttgtctcagctcactgcaacttccgcctcatgggttcaagcaattctcgtgcctcagcctcccgagtagctggtagactacaggtgcctgccaccacgcccggctaattttttgtattttagtggagatgggtttcaccatgttgcccagggtggtctccaactcctgagctcaggcaatctgtctacctcagccttccaaagtgcttggactacaggcataagccaccgcacccagccgaaagtgtgtcttcatcaacccaatgtggaatgaaagctttcgctttttgccagtattaggtgaaaattgttatctccatataatttttttatttatatgcactttttaattgagataaaattcatataacattaaattcacaatttgaatcattttaaattatatgctaaactggcttttagtcacatattgtacaaccataaccatgatctaatgccaggacattttctttacttcaaaaatccactctgtacccattaagcactcacttcccattatcccctcctctggcaagcactaatctgccttctgtctctacagatttgcctatttcggacatttcatataagtggaatcacacaaaaaacagcctcttgtgtctgatttttttttcacataacggaatgctgtcaaggttcaccccagtactatgcatgaatacttcattctttttgaaacctaatatcccattgtatggagagaccatgttttgctcattcattgttcagttgatagacattagagctgttcacactttttgactgttactaataatgctgccaggaacattcatgtacaactttttgttggaacctatgtttttatttctcttgagcatagccctaggagtgtaatttttaggtcatattgtaactctgtgtttaactttttgaggaaatgccagactgttatccagtgtcagcaccactttacattgcaccagcaatgtacagagttgcaaattctccatattcttttgaacattctcgttttccttttctaaaagaactatggtcttctagtgcatgtgaagtagtaattcattgtggcttcaataggcattaagatactgataaatggtattgaacatattttcatagaccaattgatatttgtatctttttggagaagttttcactcaagttctttgtctactttttaataggttaatttgggttgtttgtaatttgagtggtttgtaaattacatgccctttatatatgctggatactacacccttatcagatctgtgctttacaaatgtattttcccattctgtgggttgtctattcactttcttgatagtgccaatcaatgcaaaatagtttttaattttgataaagtccaaattatgtatcatttcttcttccaactgctggacagtcagggaacagcttagaatgagccctgggctgatgtgataccacatccaaggatgcaggaaggatctgaagaaccaatgtccaagttgtcttgggagaggaaggacatggtttgtggtttagcaggtgaatgggcctcatcccacctttttgcagggaaatcaggaaccgtggaagaggtggttgttttggccgtgggggtagtggctgtgaagatcctgcttctctgcctttgcctcatcatcctcaggtaagcactgcctgaagaccaaggacaggcatggggagggcagaggacatgatgctgaatcccagaatctcaatcctgggggtatgcagacagtttacgtggtcctggggccaggctggaggctgaattggtggtgagaattacacatgggccatttgtggtcagtttgtgtctgtcccaactgagggccaaatgccaggatggggagcttcctgttgtcatcaaggaagtctagacctgctcttcctccctgtgatccctccagcctctagcagggcacaggaagttgagttggctgccctttgctcccttcatgtggccacacttacaggtccttgtctcttcactcaatgtcagtttccacaagaagaaggcggtgagggcagtggaggttgaggagaatgtatatgctgtcatgggttaatctctcaggtgagtgatgtgggcctctcactcttcaacatcctgctggataactcctccacaatggcctccaggattgctctgcccatcatggccaaagttaagccaactgtcttcctcctcaaacctacttttcctgggatgtgggttcttcatcctgcagatgacaaagaggcctcatctctaaagtcagaacctgggtgtgggtctccatcttgacccccctcccttctctagatcccataaattactagctcttgtccctccttctcctaagcagggctcatcttgatgcccttttctccatcctgaccctggtcattcttgcggcctcacctcttccctgatcactgaacccttttcacctcctgcctccatctctccccaacacaggcctccagactgtacttccagatgtctcctcatccagttcctccacagtctgaatggccatgtttcctcttcattgctggagaatgaagtgcaaatgccactgcctggactgaaggcctttcacgatctgtcttctgctggactctgctcctgatcccccttctccttgcatcacccgaagtctccctacacccaccaggccaagccctctgtgattctgagactttgcatgtgtagttacttctcctgaaatggccttcctccccattcctgccaatccaggtccttatcatccttcaggttgtcttaaatgtcatccaggtgtgtgtatttttatgtaatccttgtatgatattaagcggagatgtggcatttgttcattaatttgtagacatattcagtaaccatactgaatacatataatgactatgtgccagcatttccgtatgtgcaagaagttcatcaatagatatagactcaaagagctctgtcatcaagctgttgttctgaagagcagaaggatacaaataaaaagaaataagtaaaatattttttcccatgttggatagagatatttgtttagagaaaaataacacagggaaataagcacagactatactgggaaacagtttctatatctgatagtggaaagaggtgacatttaggcaaagacgtgaaggtgctgaagaggcgggctctgagtctgaataagagaaaagcatcccaggaaaaggataaggggaagagcaagtgcactgctcagaggcagcagcaggcctgggggttgtgggctcaaccagagccccatgtcttagagcagaggaagggtaaggagggagcagcaggaaggaagctgcagactgcgtggggtgctgcagcgcgcacaggagcctggagcctttgggaagggcagagacacaactggactctcactctgacctcaaatgcctgagtcagagcaggcccaagtgggtcatggcagccacaggaagacggggaaggcactgctgggtcctccaggaggagggatgagggctgagccagcgaggcagggtggggtgaggacatgtttttggatgtgtgtggaagatcaagctaataaggatcacaggctaactatgtgttcagtgaggggaaggcaatacaaaggacgaggccggaatgttcccctgggcacctggaaggaaggagctttgtccatagaggactgaagagggaaggactttcctagagaatgattaattctgagaatccacctgacatcagaatgggactaggagggagacagccggatgtaactgtcaggagctcaagagaggggtccagattggagatgttacaatgcacattcaacaacttggttcagtttccaaaaatattactgctgagatgaaagaatacagacacaaatgagtacatttctaggaaattctcatgtggacaaaagtaactcaccatgagagagagcatatcaatggttacccagcacaggaggtgagaatggtgagctgcaaagaggcttagaaaaagcagagtcatgtgggatatgagaactgagcacaggtgggtaggaaatgtaggaaatgaagttggagagagatggaggctacaaatattgcagtgtcctgagtccattatacttatttatgcatttgagcaaaagagtgagatgaaatgacacttactttagtggggtcactcaggctgcagtgtgagaaagtatagatgagaggagaccagattagtggatacagagaatccagtgaagagatgacgcagacatagtcctgggtaaggatgatgaatctcatgtggagaagttgggttctggacacatcttgaagatgaagccaatagtatttgcgaatggagtgacggagtgcacgtagggtaagagcaaagatagctcgtggcctctgcttgataggtgccacagatatcacaggtgagtccacagatatcatagatgtcatggatatccatgaagacatccatgacctcaataatatcatggagagtctgattacacctccatagatgtcacagatgcccacaggtgccaaagatgatgcccatgtggttacccagaatggagacttaaataatttaactgccaacaactaaaattgccaaccctgcaggaggagaatattcttaagtgtagatcaaatattgttttggttactgtaatttggaggtggtcccgagccacccacgtagggattgtaggtagaaggcaggagtctgaagttcaggaaaggggtccaggtgggagatacacaggtttgggagcctccacattaaggtttgatgatggacgaatccacaaagaagagaaggggtccacggacacagccacaggaccctccagcatttagtgtcagggagaagaggtggaaacagcaagaagactgtatagagcagctgctgaggagaaatgagtgaccaggagagtgcaagttcaggtgatggtggccaacgggggctggagtttcaaggagagattggtcatttgtttcaaatgctggtaagtctggtaagatagggtttgagaaacgactatttgaatttagctaagttgtatcacaactggtattgacaaaagcagatctggttgcctggtagaggaagatctcttgactagaaagagttcaagagagaatggaaggagagaaggcagaaaccgtcagtgccaagtactatttggagaaacactgcaccaaatctagaaccaagaaatgggcctgcagcagaatatggtcgtgccctgtagacttgccatttctggcagcatctgctcttgtgtctctcatgatactatgttccctgtttgtgtagggcttttcaccccttgagttaactgcattcccatggcttcccctaccacactgtgagctccacaaggacatggttagatctaattaggcctccatcattctactgtctcctattcagctgcacactgtcaaaatttacaattacctgtatgtttctgtcttcatcccctcaagtactggaagtcacaacccccacccctgctctggtctgctttgctccctcctgaggatccagtgtccagcacataggaggtcccagagatctggggttcagctcaggttcaacagatgtatgacctttgtaagtaccaagtatcaaccaataagtgttaccagtgttgcttaactgagtaagtggagccttaattcagaaacatttgatgaaaaaaaatggaaaagtaaacaaacatcctgtcaggttcaaattttcttaatggactctctctgcttactgtccagccacctccccactgtcctgctctgaacaacttcttttctctccacatggaacatcagaagaggtccaagttacatggcccctctgacctctgaagctcttcaggggctgcccccaccatggggtgaggagctgcattatgcttccctcagctttcatgggatgaatccttccaagggcacctccactgaatactcacaggtcaggacccagtgaggaacccacaagagcatcaggcttagccagaagatccagatcctctataggcagggggccaaaggctgattattggagatttaataccccacaggcaatgggtttatagacattatggaactttcctgctatactaacatcatcttagacttttcaagcaaggagtcctggaatcaaatctgtgctctttcatttgctaagtgtatgatatcatgcaagcttcttaaccttccatgtctccattttgtgctctgtagaatgggtgcaagacgtcctatctcagagatattgtgaggattaaataaagctacacatgaaaaacaccactcctggtgcatagtgacagtttggtgcataacggttccttccccctcgaacagaaggcaatagtgacatttggtccagagtcgtgatggtctcatccctgaaactgtatcagcaacatgtctgtctcactcgatgctcaaaaccccaccagagatgtcttccctgacttgccctccaacatcatctctctctactcctgaatcttttctttccatctcacctgtctgctgtcaaattttctgtctcctttaggtcctgctactggcaaagccagatattagcactttgggaattttctaaaactcagggctgaacacagtcaaaatagttccctagctcctcaacccacaagaatttgaagcttctcaacgtgaaattctaagtaagggatcagcaaacctcatttgtaaaaggccagacagtagatattttcagctttgcaagccataaggtctctgttgcaactattcagctctgccattgtagcaccaaagcagtcacaatctgcaaacgaattgtatggctgtgttctagcaaaatgatatttactaaaacaggcaccccacgggctgtagtgtgctggcctctactctaggttcccctgaatttcactcagtctacttctcaatggcacagcctacactcaagccatgctctgtggaccccattcagatgcatctctccctgtgggtgtgcatccacgtccctcctccatgaaggactgtcaccatgccaccatcaggctaacaccttcttatttttcaaaatgacctcaaaagtggatgtctacatcaagaagatagagggaagcagaagctctaaccaccttcctaaaaagcctaagtgaaataataaaaatcatttttagaaaaccagcagcacccaaaccatgacggggtgaacgcattatgccataagttcataatgacccttaaataaacagatggaagattctggtgttgctttaaaaagccatgatgccaaaacctcactcccttatccctcaaagggacagctgagtcacatgtctttctatgataacggctggctggtgatagggatcaatctgtccgctaaaacattaaaagtttacaattagatttccggtccagacaagatgacatcggcccattttgtccctgctccaaccctctaagcaaaactataaatcctgtagatggttcaagagacaccaaaggagaactctgaagtgtgataagaagaagctgagctggtttaagaccccatgactggaggaacaacacagaggccagggatcttgcatctcccccgacctgagggaggacaccccaactcatcatttcacagcccctgacccagcagcagaaggcagctaggcgagctcctaaggttcatcctctcctgagtggaaggggatcccccgaccaacaacatcaggagagtcccacatcactcaaaaaggggatcagtgtgagccagaaacaagtggccatgaagcgctatcattctccatcaggcctgaggctctcgtttccagcccagagatactgagaccagtgggcagaactggaaaaagagatccagtcataatgtctaatattcctgaccctcggtttgctcctttatcaactgtaaagtctagtctctcactttcagaagtgtgtgtgtgtgtgtgtgacagagagaaagagagagagagagagagagagagagagagagagagagagagagagagactggtataaagcaaggtatttaaagagcagtacagagatcagtaaacaggagcttaccaagcctcctccttccctgtggctcagccaggtggcatggacagacactgtccacaggagggacactacttgtgagttaactggagcagtaggaaaaggggccagagagaagaacccagcaccacccagtcctgattgtctgccacacccctgactccatccatccctctcaagcaggcctggatgcttctcacccctctacccttctgggctaggactaggacgctagcctctgggttcaagaccttctgcagagttgggaagcatctgagctcaaattgtcacacacagtgacagctcccctgcctgggtcttcccaggggccagaatgtctcctagtgggtggaccatcatccctgggagttgtgaggcagaaccttgatcagactccagtgcaaaggtggcaggagcccagggaagggtctggtgacttcctaggttaatgaagctggtcaggggtaactgagaccctccagggtgtgctttcatcctcagacttgggctccttactcgatatgggtattaaccagggattggtgtagttccgggaaaaggatagaatacatgggtatccccagtaattagatgggaataataaagctgatcttgggtatcattggtaggaaagtgttaatcactcaagattcttaggatattttacagctattacaagaccttgggaaacaaagtttccttgtgatgttgcagctgtcctcccactaggcctgaataagtgcaaggctgctacttctctttctccatctgagcagattttcactttttcactctgtgaaaagattttcctctgtgttttctggcatttgcgtctggagccttctgttctctctgtgtgtgtgatctcagacactccaaggctctcacccctgatttctccctagacacttcctgcagtttctgtctaactcaggctgtcctgatccccagagtcatgaagtggcaggaagtctgggccctgttgatagggccctgagacctacagagaagaacttcatgcccttctaacattcccctatgtgtgcctttctgagggctcaggggtgcccatgcaggggcctggcttcctccacacctgtggcctttccaagatctattacaccaggtgatcacaccctccccaaggtaatcccttatctaaccttatgtaagtcccccaaaccctacaacagggctcgccagctggtcctccccagagctagcctttttttttttttttttttttgagatggagtctctgtctgtcgccaggctgcagtgcagtggtgtgatctcagctcactgcaacctcagcctccagagtagctggaactacaggtgcatgccaccatacctggctaatttttctatttttggtagagacggggtttcaccatgttggccaggatggtctcaatctcttgaccttgtgatccacccacttcggcctcccaaagtgctgggattacaggcatgagccaccgcgcccagcccagagccagccttttcaggcatctgacatcactactgtttttttcctggcagggttggagacctccagagaaggaaggtgagaaaaatttgagttcctttctccctcaggacagaggaagatcctggacatgggagcccgaagggaaggtccagacatggagactccatgattattagctcccaaacctctctcttctctcctaacccaccttcacacatcagagaagctctttgctgatttggccctgccatacacagaaaaaccaaagaacttctcttcactctgatatctggcttccaaaactattccctatagttgtgagtaagcaaagcagggagaaggaagacatatgtatttttataatgctttatttaccaaaattaaagaagtactttatgcaagattgtgctacttgtgtgtttacctttctgtagatttggtaagcctgccaatcaacacatatttatcacctactgcgcgcaaagcaagtccacagtgcttttgaaagttgtacgtctttgccttcagggactcactttccatagtgggacctcagtatgcagtgaggaaacttatcctctcacctgctccctgcccacctccaatctgttctccacagggaagacagagtaaattctaaaaatccacttttctgctcccttcagtggcttcccatcacccaaatgggaatagcagaaattcttaagatgagtccaaggtgttacatgcagtatcatatatatgtatacatatatgtatacatatatatgtacatagtatatgtgtgtgtatacatatatatgtacatagtatatgtgtgtgtatacatatatatgtacatagtatatgtgtgtgtatacatatatatgtacatagtatatgtgtgtgtatacatatatatgtacatagtatatgtgtgtgtatacatatatatgtacatagtatatgtgtgtgtatacatatatatgtacatagtatatgtgtgtgtatacatatatatgtacatagtatatgtgtgtgtatacatatatatgtacatagtatacgaggagatggagttggaggttcagtgaagatgtgcaaacctggatttcctcggaccctggagcagagaggatgaggaacgtgtttgaggccaaaggggtcaacgggtgggtgggggtgtgggtgggggtggggggctgcagtcaatcactgactggcttatggatgattgacataaaggctgggttgccagggagcccagtgactcacagcgtgaacccgattacctggtctacacaggcggtaaccgtgtgactagcgactgagtgccttacaggggacgacctcctaagaggctgactggcaggagcccagctaactgctggccagggcaggccgtgggggcgcgttacctgattgtctgaggaactggctggcgcggggactgacgctgactcgcggggcgctgccctggtcacggcctcagctcctcaccggccgcctcactggggcgacggccgctggctgccctcgggctgagcaggtgactggcgtggtggaggcggaggaatgcgcggcgggctcctggtgatctcctgagggtccgcggtcttgcctcgtgactgatccagaatgggccttggaccccacaaggggctcgggggcctcgcgggcctgagggtgacactggcggcctcacgggcctgggctgccccacgctccaaggggtcagctgactgagggacgccctgctctcctggaagcccactttgcgcagtcccgatacaggtcccgcagccgaggactgccggggacgcccacaggccaggcactgctgtgaggccaggaatcctccatcagcgcgcggagaaagcggtgtgaaggctccgctgtcgccctgggcccagcccgcgcgcctcgcacgttgtgcgtctaccccacagccaatcagtggctgcacaggcctctttagtagccaatcagcagcttcaggtgcctattacgcagcagatctgcgaggcagatggagctttcccccacggacacttgcctctgggagctgacgcacagccaatcaggagctgaaagtgcaagtccctccccgcaccttcaggcccagaggaatcctacgggcttgagccaatcagcagccgcgggcggtgccaggaacgtttgggcgccaaatttcttctcagcgagtcctttcctgaccgcgttcttgaaaccacgctcctctccagccagccctgaggactccgttcctcttgattaaatctgctttattttctcacactttacccactgcacactttcgaaacacttcttgctactcaacaatatttttgtggccgccccgctaggatacaggcgcactgcgggcagaattttggccgtttttttctcgccgctgtttcccccacggcctttggctgcgccctgctcgctgctctgggatgaacttgcctttcaggcagccctgcccatctctcacctcccagctcacctgtcccacctgcccgcggatcctcaccctctccgctgggctcccacagccccgtcctccccgctggctcagcccggaccccgccaggctgtgcccgcctctgtctcccctgcccgtggccggtgcccctccaggctccgcctcgcccagcccagacgcccaggcggctccgccccatagatgggaggcaactgcccagggtgcaggggcagcgaggggctgcggctgagagccctgcccggtcctggggagggagggagagtgtgggtggagggggcagccctgcagatgtcagagacagggcggcagcagcacaggtttcctctggtgaggagcccttcccttcccttttctccttccatcctctgagcatcccatgttacaggctgtcccagacccctgtggggctctgcatccaccgcggtccacaccgggctgtgctcacaggaacacatcgaatcctctcgaccactccatggactctcttgccagggccgccttgagaaaggaacacagaccgagtggcttcaacaacgcctttgttttcccacccttctggaggctggaagtctgagaccaagctgtggtcagcgttgcttccttctgaggcctctcggtggcttgcgggtggcatcttctccctgtgtcccacgtggcctttcttctgagcatgtctctgtcctaatcactaatcgctcctttttttttttttttttttttttttttttttttttttttgagacagtgccttgctctgtcgcccaggctggagcacagtggcgcgatctcagctctgtagcctctgtctgttcaagcgattctcctgcctcagcctcccgcgtagctgggatcacaggcatgcgccaccatgtccggctaattttggtatttttagtagagacggggtttccccatgttggccaggctggtctcgaactcctgacttcaggtgatccgcccgcctcggcctcccaaagtgctgggattacaggtgtgagacaccgcaccctgcctgagatgatctcttggggtcacttttatctatatgtcttctgtttcccccaaaaaaatgtttcaagaaaacttacatgggtctaaggaggctccacctcccagggtcccccaccactccctctcagcctgcagccacacagttaaaaatagtcttctgtttaattcaggtgcacgtttcttctccaaaataatcctgcccagcactgagggtgtacgccccaggcctggggtcctcgctccatggctcctgttcacctggactcctgggagcagcacttgcaggagcaaagccctgggtccagcagacgccgcctgctgtggactaaccaggggaagtgtggctgaatgagatgccagcggtgaagaaacccctcctgatgtccaggtaaccacaacgaagggagaagtgtctgcccttttcaaattgacgccttctgtcctgaccctcctttccaagcctcactgaacaacagcctcagtttccccggcctcctgcaggctgggctcccctcagtgtccttggcacgtatcaacacacaaaatcttccacagccccgcatccctctgctcagtcctcctgagactgaaccctcaacctaggggagagcgaccccacctgcctgagccctgcactgaagctcctgtcatgggaagctcagatgtcaggagcctcattgtctccccactgcacagtgactccttggggacagcgtccagctctgccttgttgatctcgtcgtgcagaaagggggtgcccaccttgcagctgctgagggagggaggagaggctgcctgctcacaccgcttgcacccctgtctctcatggccctgagtctcacctttggcaggtctgacctccacaaacagtgatagccacagaggagactcgggggtctggccagatggacccagtttcaccctgcagaggcaagggtgagacagagaggcaggatgtggagatcagtctcggcatggggagggaatctgggtgagtctctcaccctgtctgagttcagggacccaggagtggatgtgggattgtagatgattgatctccaagggcggaccctgacagtgtctgggttgtgaagttcctcctctgaggaggtcactgttccgacctcgcccctgtcttcctgtggggcctcctctaagtcttgagccctcagttcctgagagaagaaccctgaggaacagacgttccctggcagccctggcacctacaaccccagacatgctgctgctgctgcccctgctctgggggagggagggggtggagggacagggacagcaagagaatggttacacactgcaagtgcagagggaggtgagggtgcaggagggcctgtgtgtccacgtgccctcctccttctcccacccccaggttgccttgactaactctccccaagttcatggctactggttccaggaaggggctgacacagcccaggatgctccaatggctacgaacaacccaaaacgaaaagtgaagaaggagacccagggccgattccgtctctctggaaacctgcagatgaacgactgctccctgagcatcggagacgccaggaggaaggaccaggggtcattttctttcgcatggagagaggaagcatgagatggaattacgcgtctaaccagctccacgtgttggtgacgggtaaggcgcaggctccagaagcagcacaagaaaaggtcctggggctgcagctcaggggtgggttgggacccctgtcctgggagggggttgggggtgaagcgtgtcgggctcatgggaggcactggaccagagcctgagcttccccagggctgcacctcagacctcccctcccgatcctgcacccaaccctctcctcaccagccctgacccacaggcccaatatctcctccctggggaccatggagtccggccgcccgggaaacctgacctgctctgtgtcctgggcctgtgagcaggggatacccctaccatctcctggatggggacctccgtgtccttcccgggccgcaccacagcccgctcctcagtgctcaccctcatcccaaagccccaggaccatggcaccaacctcacctgtcaggtgaccctgcctgaggctggtgtgaccttgaccaggactgtccaattcaatgcgtcctgtgagtgctgggccgggatgcctgggtccctggtggggtggggtgttgctgagagcagcaggattggggtcaagggtgctggctcccagaatctgggcttggagtggctggctctactttccccatttacgcggctcctggggagacagggccagtgtccccagccctcacagtgatgtgggtctgcgtgtctttctgtcccagaccctcctcagaacttgactgtggctatcttccaagcagacggcacaggtaggacagagccccctccctggggctgggggagcaaggtctgcagctcagggcagggccaggtcctccgcatcctggactcaccctggtgacctgagacccccttgtgggtgaatccagtgcccctgcccatcctcagcccctgtggccacctgagcccctgttcccatcccgccctcactccccttagaatcctccacacgcaccctccttggccccacagcaagggcagggggacattgatacagcagggccagcctcgagggtcctgatcatcaacctcctgaacacacctctttctctacagcatccacagccttggggaacagctcatccctctcagtcctggagggccagtctctgcgcctggtctgtgctgtcgacagcaatccccctgccaggctgagctggacccaagggagcctgaccctgagcccctcacagtcctcgaaccatgggctgctgaagctgcctcgagtgcacgcgagggatgaaggggaattcacctgccgagctcagaaccctcggggctcccagcacatttccctgagcctctccctgcagaatgagggcacaggtgggtaggggaggggctggaggaggagaacacacctgcgccaccctcatgggccacccactgcccgtgagcttcaagggggagctcagctctggtgtgtgctcagctgtgaggcctagaacttccccacaacccagagcatcactgtcctctccccgccaggaaatgggcgcggggtggggagaggggaggagtgggtcttggaggggaggagctggggcccggccaggtgtatctggggagacaagtgccttgctttgcagtgcttagactaggaagaggcacgtgaagcacttgccttggtaccaaatttaagaaccaaaactaaagcaagagaaataatactgtgacacgataatcatttttaaaaaataaaaattaatgcaaaataattccatggcgaatacaaatcaaaattttaaattaaaaaaaaaactgcacccagcactgtcatgcctcactggcctcaccagaagtccgtaatcctcctccttctgatgcccgctctttgtgtctgggaaagctgggaggagaatcaaagtcgagggccttacaggcagcagaaggtgaggagacccagttattgaaggtaaatcccagagataactccaatccatctgcaggcaccacatggcctgtatcaggagtgatgctgggggtggtcgggggagctggagccacagccctggtcttcctgtccttctgcgtcatcttcatcgtgtgagcattgaccctggggagggagggagacccctgagggagggcaggccaggaacagaatccctgaagccagagctggagggacctgcatggtcaagagcttaaagcaagggcaagaaggaggtcacaggtgcacggtgggaatttcacaagcatctttgttcgtgaggctccaagtctatggcaaacctcaggccccactagccagaaggcaggaacctgtgttctcaacaccggggtccctgggactggttcacccctctctcacctcagtcatccctccagccctttaataggaaacatggtggggcggggggtcggtccacccactacaccttgatcggtacagactgaaagactctggtctcttcactcagagtgaggtcctgcaggaagaaatcagcaaggccagcagcgggcatcagggatatgggcatggaggatgcaaacgctgtcaggggctcagcctatcaggtgagcgatgtgggcatctccatacccagcattcagcctggacacctcccacaggatggcccccaggattgctcagctagtcctggccaaagttgcctcctcacctcctcctcctacctacaagctggcttctcctgcaggattcccccatcttgctgacagcatggcagcccctcctcccagaccaagcatggaggaggattacatcctctctgtcctccctgtcttcctctacagctgaaaattcaccgttatcttgtcaatttgccccacaaagaacagctagcatcacccccgcccaacctgaccctctcattgctgaggcctcaggatcttttccttgggccttgtcacctccctacttctcacctccccttccctatctggagggaccatctggaaggcatcactgcccagttcttctgcatttggacagctgtcctccacccccattgtctagatcagaggccagcaaacattttctgaaataccagatggtaagtatttttagctttgtggactatacagttgctgttgcagctactcaactctgctgctgtagaatgaaatgagccgtagaccatgtgttaatggtgagttggactgtgttccaataaaactttattaacaaaaacaagcaatgggccagatttaatccaagggctgtagtttgccaacccctgacaaagcccaaactcctcagcctggagccctgcacgttctggcctgttaggcacctacctctccaggagggccagagttagggtaagaagagtgaggcacttgctttgaatgcaacatttaaggggatgccaaaaatctcagtaattgagaaaaactaagtttcatgcattgttttttaaaacatcaaaattaaatttaaaaaaaccaatgataagccaatatcaagattttaaataatgacaggttcaataaactgaagtggccgggcgtggtggctcatgcctgtaatcccagcactttgggaggccgaagtgggcggatcacctgaggttaggagttccagaccaacctggaaaaaatggtgaaaccccacctctactaaaaaatacaaaaattagccggacgtagtggcgggtgtctgtaaccccagctactcgggaggttgaggcaggagaattgcttgaacctgggaggcggaggttgcagtgagccgagatcacaccactgcactccagcctgagcaacaagaatgaaactccatctcaaaaaataaaaataaaataaaaaaataaactgaagtgaattaagaattatttaagatcatcacttagtcaagagaaattatcaagtagggcagtgttctcagttgaaaatgagagaatcaaagtcgaatttgaaaatattatttctgccttgcttccagtagagccaggaaagcagattataataaattctgctctaggtatacgtaaaatctttaaacttaaaatgatgttttattatacaccatttttcaatttgtcagtagtagctcaattatttaatgttccggataaaagtgaccattaaacatacatgaaaacatataggccaggcacggtggctcatgcctgtaatcccagcactttgggaggccgagacgggtggatcacgaggtcagaagatcaagaccatccttgctaacactgtgaaaccccgtctctactaaaaatacaaaaaattagccaggcgtggtggcgggcgtctgtagtcccagctactcgggaagctgaggcaggagaatggcgtgaacccgggaggcagagcttgcagtgagccaagatagtgccactgcactccagcctgggcgaaacagcgagactctgtctcaaaaaaaaaaaagaaaaaaaagaaaaaaaagaaaaaatatatatatatatgtatatatatatataaataaagagggacagacatttttctcgtgcctcaggctgcaattggctcagcaaagcacattaaaaatcctggatttctttaaatgtttgttctccatggagttttttggcactaattttgattttaaaatattacatgaggctgggcgcagtggctcacacctgtaatctcagcactttgggaggccaaagtgggcagatcactggaggccaggagttggagacgagcctggttaacatggcaaaaccccatctctactaaaaatgtaaaaattagccaggcgtggtggcacacacccgtaatcccagctactcaagaggctgaggcacgagaatcgcttgaacccgggaggcggaggctgcagtgagccgagatcacgccacggcactccagcctgggtgacagagcaagattctatctcaaaaaaataaaaataaaaataaaagggctatagtctgtaagtggccatctaggcaggcagggaagtgtaacctctggtaaaagttgaaagtcaggtattttgagggaggagggcttggagcaggagttctatgttggatgggttggctaaatatacatatttaacacattataggcagagttttgggtatttatgaaagggtgtcatgcatacgtgtgatggataaatacctaagttatatgcaactcatgtttattttggggtggagacttaatatttaaatgtattataattaagccatctctgtcaagagatgaagcagggactcagaggtatttgagtgtgtagtctcctacacacttggaggagctaatgagattagtaaacaccaaatgaggtgctcagtaagtgttaaatattggaggaaagcatgaaagagaccgacaaaaatgcaggtgggatgaatggaggacggatctcctgggcctccttcctagactctccccgcctcaacctggccccactgctctgttctgactcccttctcgctctctctgttcagggacccctgactgaatcctggacagacggcagccccccgaagcatcctccccccagccatggctgcctcctccttaggagaaggagagctccagcatgcaaccctcagcttccataaggtcaggcctcagaacgcgcagggacaggaggccatggacagtgaatacttggagatcaagatccacaagcgagaaactgcagagactcgggcctgattgggggatcacggtccctccaggcaaaggagaagtcagaagctgattcttctaaaattaacagccctctagagccctatgctgtgcggtaggtcaccagggctccctcctcctgcggaatcgaaacttggaccaacatctcccctttcccaggccacctcggccccgtccctgcccccagcttctgctacccaccactctcctctctatgtttctgaggttgactatttgagattccacatgtaggtgaggtcatacaacatttgcctctctgtgcccggctcatttcaaacaacataacgtcccctaggttcatccgtgttgtctcaaatcacagaatcatgcactgagtattttcaaagagctaagagaggattttaaatgttttcacacaaaagatcgatatttgtgcggatgggtgtgctgatcatgctgacttgatggttccatggtgtatccgggtgtggaaacctcactagggccgtctcaaggctactcggctactcgaggcagggatggaatttaaagcccgcctgattctgaggtctcttctctcatccggtgctgagtcaagcaaccagcaggccgggcacctcttagccataagtttgcaggaaacaatattcctcgagggctttgttttttcctgaagagggggcagcagtagcccagggtctcccggacgtgacaggtgcattgagtgggtgaaggctggggacctctgcgccaaagggatgtcatgtctttatttgttttcctcaaaatttttaacatgtgttttttaaaattgcaggttgtttatttgcttgtttttccttgaaatttgaaactagcattagcttttcagttgaggcaaatttacctaccatgaaagacgcagatctcacatgtgcggttccatgagctccgccaaatgggcacccctgagtcaccggctccccaaagacagagaaactttccatcactccagaaagatcctggggccctgcccagtcagtcctcagccctgagagccaccgcttcctggtttctgcgaccataagttactttccatgtccttgaacttcatgtgattggcatcacccagtatgtattcctgtgtctttttttactcagcgttgcgtgttctgagattcatccacgtcgtgtgtgtcagcatctgttcctctttattgctgagtaggacaccactgaatgggtacatcacagtttgtttacccatttttttttctgttcatggatatttagtctgttttggttttggtgattatgaatatagctgctgtgaacatatttgcgcaagactgtatcgaggtattttcatttctctccagtgtttggggcaggggatgggaacagtggggttggattcccatgcttggcgtgcgagggcatttgggatgtcctgtggagatggcattcagcagctcaggaaggagggaggggctggagatggacacgggaaacatcagggggttccatcatcctgatcatgggcgccggttgttttgggttgaatcttgtcccccaaagagatatgttcaagtcctaacccccagtatctatgtctgtggctttatttggaaatagtctttgcagatgtagccaagttaataggaggtcatactggatgaggtgggccctaagtgccatgactggtgtcccaatgcaatgagggaaattgaacacaagacacacatagggaggaaggccacatgacagcggaagcagagcttggggttttgctgccacagtccccagaagctggaagacgccaggaagaatcctcccagtgccttccgagggagatggccccgctgacactgtgattttggacatttggccttcataatgtcgaagaataaatttctgtggctttaagtcaccaaggttgtgggaatttgatagggaagccctaagaagccaacacacctgacaccaacacacctgctggcacctgctgtgctgcaacctggacccatcctatctccgcaggcctcaaagtgactctcaagagggccggctctacccaggccacagagaagcccgggggagctgctcagcaccatgcaggccagcaagcggaaggtcttccgccaccagcattgagctgcccgaggtattaatatcaggccaccgagacgctgctcttctctcatgcaggtgctatgtttacagtgctaattttgctggaacaacaacaaaaaaatcagttccaaggccctcacacactcaagatttttgaaacaaaattaaaacaggagagcaacaaaggaccacacaggaacggctgttcactggatcaagatgttctgcaatatgcagtgtattcatagtaacccatggggaggaccctgaggcagctctccctcttccctgaaacggtttcttaaaaagtagcttgtttggccgggcgcggtggctcgtgtttgtaatcccagcactttgggaggctgaggcgggcggatcacgagttcaggagtttgagaccagcctggccaacatggtgaaaccctgtctctactaaaaatataaaaattagctgggcatggtggcgcatgcctgtaatcccagctactcaggaggctgaggcaggagaatcgcttgaatccaggaggcggaggttgcagtgagccgagatcctgccactgcactccagcctgggcaacagagcgagactctgtctcaaaaaaaaaaaaaaagaaaaaagaaaaaggccgggcgtggtggcttatgcctgtaatcccagcactttgggaggtcaaggcgggcagatcacaaggtcaagagatcgagactatcctggccaacatgctgaaaccccatctctactaaaaatacaaaaattagctgggcatggtggcgcatgcctgtaatcccagctactcaggaggctgaggcagaagaatcgcttgaacccgggaggcggaggttgcagtgagccgagatcatgccattgcactccagcctgggcgaaagagcaagctctgtctcaaaaaaaaaaaaaaatgcaaagtattcttaaaaatcctaattctgcaggaaagttaatgacgtttggcttcaatacgtggccatgcacctttccttagctgtacaggtgagaactggaaaatctgcaatctgtgactgtacatatatcacactctgcctgctgtaagcaattggtttgtgtaggttccatttgccctgttggtcccaggtgagctgttcattcccttcagaccccaagtaaataagtgaaagtctgttagcaagttccagcctgatgagaggggcctcacactgagaaccccaggcttcctttccagggcattatcggcagttgcctatatcagtagctgaagaagagattcatccaaaggaataaggggaccccgaaaaacagacttcaccctttcccaattgcagcctctgctcccacctgggcttctcacttttccatctctggatctctgtcttgtctgttgcctatcgagtggattcaatggccaaacaactgcagtgaaagtgaaaacagacaaccctcaaggtacaggaagatcagcaggatgacaattattgcaggtaaggattcactgcattcagtccactgtcctcggacacaggagataaactgaaatccacagagaatcagaccgtgggctgaagacggaactgtctacataggaaagagcacagaaaactcagattcttacctcctgcacaactgctcacccacaggctctggtgacccgttttgcaaacacatcttttgcaagtacagaagtggtgggcacgctctggctttgtagctggtgggccagttcaggttcttgacttcactaggcaaaagaattcgagagtgagtccagtgtaaaagtaagcaagacagttaattgcaaagtgaacgtgcactctgacagctggtcagagcggctgctcaaaggtgagacagcactgactgacgctggggaaacttcctttaggggaatcttctgtgattactcatgcgtgggtgggacggtgttgctcttaagcgtgttctgggtggtctgttaggcccgcatgcgcaatggctgtacatgctagtgcatatacatcgctgtctcagcagcaccttaagtctccacgtgagggtgtgttttcactattataatgagcataggtcagcccaaggacactaactaagcatgggtttctgcacttgcacgaatttggggactttcccttctgcccttctacccccttgctgcaagacgttctgaccatgagcccaggatgttctctccatctatttagcaagtttgtttccctttaagagaggctgtgacccgcctgtctaacctatctccttttggtacagcagcacttggagcaggtgtagatcacttctcggggctgcagctgcacactctccgtgtattcttttgtagcctttcctttgggtatcgccctggggtcggtgagcgtggttcccagctaggacaacaggcaaacgccgccaagaggttaagatgaccccattgaccacagagcaccagaagtctttggaaggcagcagcacaacaaacgtcaccacaaagtcctcacagaagaccagaagccacgtcatgacagcgcggatcatgccacagccgttgcaatgacccagaccccatttgccacatcagcctcagagaaagaggaggatgacgaagagtcgttattgtcattttcagtcaggagaggaggatgctcggcaggcacccagagacacctgaccctggccgtgcaagaattctgaggagtgtgtatcaggatctagcgcataatgcttgggtactttagcaccaaatgtgtaagatacactcagaaatgatttctaaacatcacttgaacactttgtgccttttcttcaggatctaaggtgcatgctgtcctgtgtgataggatctgaggcccaggcggggtcggccggcgctgcagctcctccctgcctcctgcagttgccaaggctgggatgcatcatgcagctgcactcacgtctgggccagagtgggcccggggctcaactctgtcccctccatgccactggccagttagagggagatggccaccaagcagacgctggagcccagagcggcatggcccccggaagtgtcacccaatttttaaattactggtcctgttttaagaccagctgctttccccctcaacagggtactcttcccttgtaccattaaatattcctcagcaagtccaatttcaatggctgcagggcatgctggtaaaatcccaaacccaagttcgtataaccagtgtccttgttggagttttacattattcctaaattcactattaggagtataaactaaagttctctgaaaaggattttggaggaaagagactttattccagtgaacagtttgcaaaccagagagactccagtgtaaaatgaagggtgcgctccataaagccaagggaagtgtcaggtttagcgtcctgcccaggctcccaatcaggtctgtttatgcaaatgaaggattgaaactttctgagttctcattggtggacacagctgagctctgattggttggctcaggtgatctctgaaagtccggaagatgaaaatgctgtgggttttcagggaagtcagagtacgtgggtgacctgtacttggctctattttaaactcaggctcagttagccactcaggatccgtcttgaaggagtggctcattcaggttcacatttgttcacaggaataacactgagggttaggatatttgtagttttttatccctcacccccttcctcattctgagtctccaataatgtccattacaccaccctgttgcctttgcacacccatagctgagctcccacttataagtcagaacatgcagtatttgctttttaattcctgaattacttctacacaggggtggacttgtgtagacaggagcccacggagggggagtcgaggtgtgcacagattcgatgatgtgtttcgtactgagaaataacagagagagagaaagagagacagagaaggggaaaggcagcaagagccactcagaaatgttcaattcacagggtatctcaagcagtacttggaaatatatttgccttttgcttttataagaacacatactattttattttgttttactttaagttctggaatacatgtgctaaacgtgcaggtttgttacataggtatacatgtgccatggtgcacctatcaacctgtcatttaggttttaagccccgcatgcattacatatttgtcctaatgccctccctcccctgtcccccatccccctacaggccccagtgtgtgatgttccccaccctgtgtccatgtgttctcattgttcaactcctacatatgagtgagaacaacacacactattttataattgcagaagggatacatttgctacagaaaatttgaaaaatctttaaaaaaaaattataaataggccgggcgcagtggctcacgcctgtaatcccagctctttgggaggccgaggcaggtggatcaggaggtcaggagactgagaccatcctggctaacacagtgaaaccctgtctctactgaaaatataaaaaattagccaagtgtggtggtgggcacctgtagtcccagctactcgggaggctggggcaggaaaatggcatgaacccaggaggtggaggctgcagtgagtggagatcaagccactgcactccagcgtgggtgacagagcaagactccatctcaaaaaaaaaattattttaaacgattactatgtatttatgcctgtatatattttacattttgaaatagataaatattaaatatgtgaaataaatataaaattatttattggcccagcgcggtggctcacacctgtaatcccagcactttgggaggccgaggcaggcggatcacctgaggtcaggacttcaagaccagcctggccaatatggcaaaaccccatctctactaaaaatacaaaaattagccgggcatggtggcgcatgcctgtaatcccagctacttgggaggctgaggcaggagaattgcttgaacctgggaggcagaggttgcagtaagttaagatcgtgccattgcgctccagcctgggtgacagagtgagactgtctcaaaaacaacaacaacaacaacaaaaacaaacaccctaaaagcccaaggatatcaccccaggccaccttgcactgaatgggagcacttagggaagggaaattctttccgcgctggctccaagaacatcgtgttctccgtttgctttacatgaaaacatcttgcatggctcttattttggatgcattcctgaaatttcttgtgtgcacatactagacgtcaaaaaaggcttcataatcgtatttttttaatatttttttttttcagaaggagtctcgttctgtcatcaggctggagtgcagtggtgcgatctcggctcactgcaacctctgtctcccatgttcaagcgattctcctacctgtctcctgagtagctgggattacaggcacgtgccaccatgcccagctaatttttgtagtttttagtagagacggggtttcaccatgttaaccaggctggtctcaaacccctgacctcaagtgatccacccatctcagtctcccagagtgctgggattacaggcgtgagccaccgcacctggtccttaatcgtattttttaatgcccaatgtgctgcttgatgttgtgatgtatactctgggttgtagaggagagaagagtttccctgtactccctgagggttcgataactgactctaggaaataaacggacaacaggcagatcaacaggagaaaaagaatcaagggtcgtggggtcctgggcctggggatttctgcagctttctgcggagggatgagctctgactgtgtgagggtctgaggttcctcttccacgcagggctgagtctcctgctcctccccagcctctgggggtcctgcagcccttcccctccactccattccccttctctgctcacacagggatcccgggaagtcccgcctcagcgatgctgctgctgcccctgctgtgggcagtggggagaggggccgggggagctggacttcactgaccttcattctccacaggggacatggttcaggaggcaatattctggctggaagtgcctgagcccatgcgtctttgtgccctgctccatcttctcctcaaaaaacagctgcaatgattctaccgcagctgtggttactggttctgagatggggcccgtatataccagcacactccagtgtccacaaacaacccagatcacaacattcagggggagacccagggccgattccacctcagtggagacccccggaccaacacctgctccctggacatcacagaagcacagaggcggggatgcagggacgcacttgtacagggtggagagagggcttatgcaagatataattacagtgggaaccagctctctgtgcacgtggggaatcagggcaagaaagaacacactggtatgtactgagggccccctggggcaaggctgggctggtaccccagcttctcaccctgaaagggacccagggagatggggcgctggggagggtttgggggagtccagctgcctcagggagaggctgctcttaggtccacacttaggggtccccacctgcagggcctgggtctctgtctctgtcatctccagccctgatacagacactacatccacatccaggggaccctagaatctggacattccaggaacataacctgtaagaggaagacctccccccgcccactttctcttggatcaatgtggtccccacctccctgggaaagaatcctcactccttggtgctcaccttaccccagggttgcacagcttcacctgagcccttccccagagctggtgcaaccacggagagagccatcccaatcaatctgtcctgaaagcacctggccaggcccctgggtcctggagttcactgggttttgggagaagggggcggagaatctgagttactgggggactcttcttggggacctcttcttggggacctcttcttgggggcctggctggggtcaaagtggagggaacactcagacaccaccccgttgctcaggactgcccgtcacatggcaggtggtcagttactgatttctactccagatgctccacggaacctcagcatttgcatctcagggacggcagcacaggtgggagatgccctcagctctctgaagggggtgggtctctgccagccctgggcagaattgaggtctcaggggtccaataaggggaaggtcatcgagtgtgaccgacgctgcccctcactttcagcccatccagtctcgcttctgccccctccccaggcagagctctccatggtcactgtgacttcctagctgacaacccactgtcaccaccggcgtttcctctcccccatccttccctctcccctcactctcccatgacagcctcctcccggttccctgccacttctctggccatgccatccccgtctcccacaggaaccttatatccagcagttcccacagtggggtcttggcctccagccgctctctgcatgactcctccaggaagctcctccaccctagtggtcccagtcctacctctgccctgaagacccccataaatctctgtctggttcagctggtgctgagcacatcccactcccccttgggaggcccctcccacctgagaagccagagtcaatgtcctgggagtctctttgcacatccctgtatttccccagtacttcccatgagttggtgagttttgcaaacttgacttccggaaactgtctcaactcactcctttcctccatccccacctctggcctcgctcacctggacccgggtgatgcctggacctgcagcagcctccctcctggcctagcagcttctggtcttgctccctccagccgaccacaattcagatcccaaaaaggggtctctctctaaccagatctttccctgtcccttccctactcagctcctcccctggctcctgtggctcctggagaaagcccaagtgtgtcacctgtcttggttcctccaagtggccagaaccacgagggttagcgccctccacagttttgcacatcaaggccggtcgtcctgggacgttctctccatgtcccgatacggccaagtcctccgcatgtttccatgcccctgtcccgggaccattaaggagcctcccgacccctgcatgctgggggtcttcgcccctacttgcccttgcttgtgatgcttgtctcagaaacgcagtttcctctcctgagtctagagggaagacacagggagagaagggcctctcagccctgcccctctggctctctcggtctccctcgtccctcaggtcctaggcaatgcccactcctggtaggggcaggagggcagtccctacacctggtctgtgatgctgatggcagcccccctgccaggctgtgctggtcccagggcagcctgaccatgatcccctcccagctcttgcatccccaggtcctggagctgccccaggtggtttcaggagacgaaggagaattcacctgccgggcataggccctgctgggctcccaccccatctccctgagcctggctgtgcatggggagtgttagcagaacacctgattctaggggtccataggcaggggaagtgtggactcaggaaactcccacctcagtcaccctccagcttttcttatgcctggtaccacctgttactcaccccaaatctctggagaccagtgaggctcctgacctctgaccctcacactgctaaaggaggccctaagtgggggcaggggagtgggtagcgggggatggctttcttttaactcacagcctcacctggatctactgcaccagggaagcaactcttctcaaggtgtcctggaatttgagcccccaaatttggctgacttcacccatcttctccccaaaggaaccctccatagtgctggtctctcctctcagaatggtgtttaccccactggctcagaggatcccaaggggcagtgctactctgggtgactgagcgactgaacttcctcctcacagcagggctgaggtctgggctccagagcccgacaggggtgagggtcctttagaccacgtgttctgagactcatcctgcacagggctggagcaaagagctcctgggtgctccggccccacctcccatgcagaataacctctctccacccctcacctctgttccccatgactcttccttatggctctacaggagcggttgtcaggacaggtgaggaaatagatggatatgctttaccagaatttcaattattttccctgtaataccttgtttctgtcgcttactttaatgtgggtttcatgagctccaaattcattcccataacgtatttttacaaatcccataatatgtttattttacacagtcaatttttaaagagactttttattagaaaaataaactattttatgtttatccacatgtttaccacttcaattgctcttcattactttgtatacaaccgagtttctctatggcattattttcctttggccggaagatctcgtgtatttcttacagtataggtgtgctggcagtgaattcccttgactgtggtttgtctggaaacatttcatatacattcacttaaaaatacttttattgaaatttatatggaattctaggttaacatttttctttccagtaactcaaatggttttggcttgtgtaatttcctatgagaattctgctgtaatttttatcattgcttgtttgtttgtagtttgtggttttctctgactgcttttattattttattttattttatcttattttatttatttatttatttatttgagatggaatctcgctctgtcacccaagctggagtgcagtggcgcaatcttggctcactgcaacctctgcctcctggtttcaagtgattctcctgcctcaacctcctgagtagctgagattatgggtgcatgccaccatgactggctaatttgtgtatttctagtagaaacggggtttcatcatgttggccagggtggactcgaactcctgaccttaagtgatccgcccaccttgacctcccagagtgctgagattacatttttttaaattaatgctaatccttctcaaacttttctgaaaaatagaagaggagaaaatatgccctaacccattctatgaacacagtattacctgataataccaaagacatcacaggaaaatgcaactacagcccgatatcacttatgaatatagatgcaaaaagtcctcgagaaaatgccagcaaactgaatccagcagtgtataaaagactctacagaatactgagtgggatttatcccaggaatacaaaggtggtgtacatacgaaaacctattgatgtaatacagtacattaatagaatgaagaaaacaacatggaatcattttcaattgatgcaggaaaaatatttggcaaaatccaacactcttccatgttaaaacgattagcacacaaggaatagaaaagaacttcctcaatgtgataaaaggcatttgtgaaaaacccaaaggtaacattatattcaatggcgaaagactgaaactctttccctctaagatcaggaaagagacaaaaaatgcctactttaaccagttttattcgacatcgtactggaggttctagttagggcaattacacaggaaaaaaaaaagagaaataactggtatacaagttggaaaggatgagtatttcttatatatagaacattgtaagtatcccactaaactctcttaaagctaataagcaaattaccatatatgccagatacaagattataacacaaaatacagttgtatttctatacgctagcaattaacaatctgaaaagaattaagaacaccacccccatttataataccatcaaaaggaataaaatatttaggaatacatttacccaaggaggtgtaagtcttgtgtactgaaaaataaaaaatattgctgaaagaaaataaagaagacctgaatcaactgaaaaacaccctgtgttcatggattggtagaattaatattaagatggtaatattcctcaaatcaagattcagtgcaatccctatcaaaaccctaatggatgtttttactgacatgaaaaaaaaactatccttaaaattcatatggaatcacaagagacttcaaatagccaaaatgattttgaaagtgaaaacattgtaggactcacatttcctgattttacaacttaccacaaagtcacaggaattaaactgggtaggcacttggtttctcaagccgcctgcttggccctcttccaagtgtactttccttccttcctttctttcctttccttgctttccttactcttctaaagcttttaaataaactttcgctgccataaaataaaataaaaaactaggtggtaccgatactgatcaatggaatagaattgagagccagatataaagtgataaatttatggtccactgataattcagtaaggataccaagaccatttaatgaaaaacgataatgtctttaacaaatggttctggggcaactggagagccacgtgaataaaaatgaagttggactccttccacataaagtatgcagtataggccgagcgcagtggctcatacctgtaatcccaacactttgggaggctgcggcgggtggatcacttgagctcaggaatttgtgaccaggatgggcaacacagcaaaaccctacctctaaaaaaatcacaaaaaattagccaggcatggtggcatgcaccagtagtctcagctactcaagaggctgaggtgggaggatcacttgggcccaggaggtcaaggctgcagtgagctgtgttcattccactgcactccagcctgggtgacaaagtgagatcctgtccccaccagaaaaagaaaaaaagaaaatacacagtatagtaattaactcaaaaaggaccaaagactgaggtgtaagaactaaaattatgaaactcttaggagaaaacatacaagtatatcttcatggccttagatttggaaggtgtttcttagatatgtcaccaaaaacacaagcaacatgagaagaaatagatgaattggacttaaaatttaaaattcttatgcatcgaaggatattatcaagaaagtaaaaagaatgggaccaaatatttgcaaataatatatctaatgagcctagtatccccaaagaagattcgctactcaaccacaaagagacaaaaatcccaactttaaaatggacaaaggtcatgaatagacatttatccaaagaaggtatagaaacgaccaacaaacacacaaaaagatgctcaacattattgtcactatggcaatggaaagcaaaactctacaacgattaagatggctgtaattagtaaaacggaacataacacgtgtcggtgaggatgtggagaaattggaattctcatacactgtatttgggaatgtaaaaggattcagccgctgtggaaaagagtctgcaagttcctcaataggttaaacatagagttattgatatggtttatctatgtccctgtccaaactcatgttaaattgtaatccccaatgttggaggtggggcctggtgggaggtgattggatcgtggaggtggaattttcatagttcagcaccatctccttggtgctgttaagacagtgagtaagttctcatgagatctggttgtttaaaagtgtgtagcacctccttcctcactctctttctcatgctcccgccatgtgagactcctccctcgtgcttcactttatgccatgattggaaacttcctgaggcctccccggaagcagaagtcgccatgcttcccttacagcctgcagaactgtgagccaattaaacctattttcctcacaaattacctagtctcaggtatttctttatagcaatgcaagaacagactaatacagttatcatattgactagcaatttcactccttgggatatacccaaaggaattggaaacagatattcaaatgaaaatctgtacataaattttcatggcagcactactactcacatgagccaaaaagtacaaacaactaaaatgcccagtaactgacaaatggataaatggaatgtggtctttccatgcaatgggatatcactcagtccaaaaaaagaaatgaaataatgatgcatgctacaacaaggattatcctcgtaaacatggatttaccttgaaaacattacccttggtaaaagaagccagacatggaaactcatcaagcttagtaggccatttagagaaaacccacaggtaacattacactcaatgatgaaagactgaaattattccattcacattaaatatccagcatagataaatccatggaaataggtacacgttagtagtttccaggggctctgggaagcaggcaatagaaagtgactgtttccctttcagggtgataaaaatgttcagaaactagatggtggtgatgattacacagcactgtgaatgcaataaatgccactgaattttatactttttcttttttttgagacagagtttcactctgtcacccaggctagagtagaacggtgcgatctcagctcactgcaacctccgcctcctggattcaagcaattctcatgcctccatctcctgagtagctgagattacaggcacccaccactatgcccagctagttttttgtatttttagtagagatggggtttcaccatgttgcccaggctggtcttgaactcctgagctcaggcgatccgtctgccttggcctcccgaaatgctgggattacagacgtgagacaccgggcccagcctgaatgttatactttaaattagcaaatggaagaaattcttttctgattttcaaatattactgaaattttaaagaaacagcagagatgctcagggtgaagcaagtgcttactgtgtgaatccatttataggaagttgtaaaacatgtaaaactagttgatggtgacaaatgtcagaacactggttgcttctcagactgtatgtggaggcagagattaatatggaagggcatgaaggatgctgttttctctggtcaaagaatgacccttatcttgagagggtttcagttgtgtgagtacatgccagtctcgccataggacgtctctgggctcccatgggcatcttgcataaactcaggaactgggttcttctattctctgctgcctcccaccaccctactctcagaagataccttgattctggcttaagaggaaataaacacagtgtagtgatagagaccctttcctgactataaaactattcacctcattgcagctgctaccatccctccttcaacttggttgttccatcttaccttgaaaagtgacttatggaacaacttgtccaaacgtctccactttagagggacaccagtttcctgtgtaattatgttgattgcaatgaaatactcctaagagagggctgacattcctgcttccaatcagaaaatgaggtcattaggcaaacgtccagcagagagagtaattagaaaagatgaaaacatgcattccaatctattctgttcttattatgtttttttttttttttttgagatggagtcttactctgtcacccagttggagtgcagtggcatgatcttggtcacagcgatcttcacctcccaggttcaagcgatcctccttgcctcagcctcctgagtagctgggactacaggcacccaccatcacacctggctaatttttgtatttttagtagagatggggtttcaccatgttggccaggctggcctcgaactcctgacctcaggtgatccacttgccttggcccttcaaaatgctgggattacaggcatgagccactgcgcccagcctatgttcttctggctggactggaggacagtaaggaaacagggcagggctgatgctttccaaacacagtgggacatagtcctcaggtcagcagcgagcaggggatgggaacccacctcatctcactaaccctagctgccatcagtagaacaaaaagtcattaataaaatccaaatcctggaacagcttcaaggaaacaaatgtcaacattgaccaagtcaataaacatgtcagtgtcttctggccagagatcagcaggcaccaggaatagatatgtagttgggttattactcattgcagtgaggaaccacgaaaaccatgaggtgtttcagtaagagagaattataactggcttattataggatttggacttgtgttaggtgatttggggaaactttttaaaaagcagtgtttgcttctttggatgtcaggaagtcagcataattctaacactggatcttcatacatctaataaaaaaggagaaagaactagaccaaagctaccttagtcagtttgggctagaataagagatatcacagaccggctagcttaaaaaacaaacatctaactttgggaggccaaggtgggtggatcacaaggtcaggagatcgagaccatcctggctaacacggtgaaaccccgtctctattaaaaatataaaaaattagccgggcgtggtggcggactcctgtagtcccagctactcgggaggctgaggcaggagaatggtgtgaacccaggaggcggagcttgcagtgagccaagatcgtgccactgcactccagcctgggtgacagaacaagactctgtctcaaaaaacaaacaaacaaacaaaaaacaaacatctatttctcatagttctggaggctggaagaccaaaataaagatgtcagtacaactgggttcttagtgaggtccccgctcctgggtcacagatgactgccttctcactatatcctcacatgggagagagagagctctggtcccttcctcattcttacaagtgccataatcccagcatgggcattccacttccatgagctcacctaaatcccattatctcctaaaggccccacctccaaatatcatcacatcacattaagaattaggacatcaatacatgaattttagggtgacaccaacatttagtctataggaaaggctgtggctgtaattggtaaataatcatcagtctttcctgttaccctagatgggaaatatgtagccattttccaatttggacaacattcttgtttgtgtctgtgttaaggcatgactgtgctgtggtcttattcttgtcttgatccattatgctcaaagaatgtccttgtctggtgttgatgtcctgtgcagtgattgacaacaggacaggagaattgcttgaacacggagacagaagctgcagtgagctgagatggtgccatggcactccagcctgggtgacagagcgagacttcatatatataaatcacgccactgcactccagcctggcaacagagcaaaactccatctcaacagccacaacaacaacaaaagtctataaaaagacttacacctgagtaccattagtgaaaaatggggaaatctcaaatgcctatcaatagatgaataaatataggactatagtatattcatacaatgggatactactgagcaatatcacactgtgaaaactataggcacaaacaacttggttcagtttcaaaaaatatgctgagtgacagaatacagacacagatgagtacattccttcctaggaaattttgaaataggcaaaagcgacacactatgagagagaggatctcagtggttgcctggcacaagaagtgggaatgatgaactgcaaagaggttaggcaaagcccttggtgtagtggaaatgttgtatatcttgattgtgccagtcacaacagggctgtatgcacctgtcaaaattcatgaaaatgaacacttcaagtgggtgcacatcacctcatgtaaattatacctagttaagttcattaaagaaacacagtaagacagattttcttatgtatccttctactccatgaatgtggtatgatattttactgttaaaagtaaatatactgaatattatattatgtgcctatactatcttttaaaataacttacagcaagatattgttttatctattgaggactcacttccttatatttaaaaagaggatggaaatacctctctatggtaggtaggatgaatgaacatttttatagatactactgtgtatagagattttacctgtatatggttgcaaatactgatatgtctcaggcattgaggatctcccaggtgtgtaccacagagagtaaaataaaaaaccatatgagctgaagctaaattttaattttgtctgtacattcaactcatattgtctggaaacattatgtctttgggcctcatttaattatcagaaatgtatttttacatgaaagaaaatgctaatctctatggtaagccccataaaaaaattgctgctgtccccactgcagggaatggcaacactaatggaaaagaaatttcttctggacttgttcacagaagctttcgttttacatgaaaatactacatgtttcttattttagagatgtcgctgaaacattgcaaatcagtgtactaactgccaggggaaaaaatccatagtcatacttcttaaaaatacctcatatgataccatgacatatggcaaagtcaccagcatccacagctgtgaagccaaacagtatttgtgtgtggtgaacatgaggctatggatggggagtatctaaaggggagggaccaggtcagtggcatctcttcttgtctccagcctcattggcacatagatgctcggtatagcttaggtgaatgaatgaatgaatgaattgaatgaatgaatgactgtcaccttcaccacatctaggacccttcttcatttcttctgccccagacacttacatgaaccctacagaaacctatatcctgcaggacgaaccaccccacaggtcaagaagaggccgtgactcgggccaggcctggagtgaccagctgcctggtgtaaacagttgtgcacagaaaagcacctcagagtggaaggactttagacatggggttcgcatgtctcagatggccccgaaggtactgatccaggctctggtgctcctggaaggcaagactcagattctgctccatctcctcccatctctgggcgagtctctggcatctctggcccatgagggtcaatctgtgtggaggggacaagctctgagcacgtgtgggtctgaggttcctcttccatgcagggctgaggtttcctgctcctccccagcttcctgtccggccctgtagtccttcccctccactcccttcctcttctctgctcacacaggaagcccgggaagcctctgcctcagacatgccactgctgctactgctgcccctgctgtgggcaggtgaatggctgcggggagaggggttgtcgggctgggccgagctgaccctcgtttccccacaggggccctggctatggatccaaaaatccggctgcaagtgcaggagtcagtgacggtacaggagggtttgtgcgtcctcgtgccctgcactttctcccatcccataccctactacaacaggaatttctcagttcatggttactggttccgggaaggagccattgtatccagggactctccagtggccacaaacaagctagatcaagaagtacaggaggagactcagggctgattccgcctccttggggatcccagtaagaacaactgctccctgagcatcgtagacgccaggaggagggataatcgttcatacttctttcggatggagagaggaagtaccaaacacagttacaaatctccccagctctctgtgcatgtgacaggtgaggcacaggcttcagaagcagccacaagggaaggtcaaagggacctcaggacagggcttgggatgggacccatgtcctggaagggggttgggaatgaagcctgtcagactcaggggaggacccggaccagaacctgagcttccctcagggctgtacctcagtcaccccttcctgatcctgcatccccgtttcctcaccagccctgacccacaggcccagcatcttcatcccgaggaccctggaatctggccaccccaggaacctgacctgctctgtgccctcggcctgtgagcaggggacgccccccatcttctcctggatgtcagctgcccccatctccctgggccccaggaccctccactcctcagtgctcacgatcatcccatggccccaggaccacggcaccaacctcacctgtcgagtgacgttccccggagctggtgtgaccacggagagaaccatccaactcagtgtctcctgtgagtgctgggccaggacgcctgggtccctgagggtgtgatggggggaggaccaggagagaggaggaccaggactggggccactggtggctgtgtcctagaggcctggctgagtagaagacctaggccacaagccctgtctctctacatttctgtggcttctggggtagggaaggagtgccgcccttatctcaccctcaccccaactgaatgggaaatcctctcttattgtcctagatgctctagggaacctaaagattggtgtctccctaggagaaggcacaggtaggatagaaactccctccttgggaagaggagaccttcagctcagggcaggggtgggcctctcctcatcctgacctcacctcatcctggtgatctgacacccttttgtgggtgaaccaaggccccattcccatcctcagcccccatggccatctgaacacctgtccccatcgccccctcactcccctcagaccccacacacaaccccctcaaccccacaacaagggcagggtgatattcacacacagacccagcctttcagcttccctacattcatcacctgaacacgcctcctgcctcctctttctatttccccctgtagttcagacctaagtgcttctggacaggtgatacagtctcatgggaagaacttaacaatgcacagcggagtctgtccttagatgcccgtcctcctccccagaattgaccagtgtccaccctggctgctctgagccttggtgtgttcacctgaaggatctcagaggtcatttggcagcaacagcatagactgttcttatcctcctgtaggacgcctgtggtattccattgcatgaatagaaattctgtataaatcttctgctcctggaaaagcatggcattgattttgttctaccaacagacacactgcaatgaataatcttgtatctacttcagcaagtgtatgcctatgtatgtgggacctgttcctaaacgcaaaatagctagcttagacgttctttttaatcttgtgaaatatggcaaaatttttctcaatcaagagtgggcaagctgacattcccaaaagtaaggggtcaaggtgcttgttttcgtcaacccagtgtggaaggagaccttttggtttttgccaatgtcaggtgacaattgttgtgtccgtgtagtttttattagataaaaattcacataacattaaattcaccattttaatcattttaaattgtatgataaagtggcttttagaatgctcacaatgttctttaaccatcccactatctaatttcagaacattttaatcactcaaaaaaaacctctaactttttgaagaaataccagactgttgtccacagtgtcagcaccaatgtatgttgcaccaccaatgggtttgggttgcaatttctccatattcttgcaaaaattctcatttttcttttcttttgttttgttttttgtttgtttgtttttgttttgttttttgttttttgagattgaagtcttgctctgtcgtccaggctggagcacggtgacacaatctcagtccactgcaacctccacctccccagtccaagcaattctcgtgcctcagcctcgcaagtagctgagtttacaggcacccaccacaatgcctggctattttttttttttcagtagagatagggtttccccatgttggctaggctgatatcgaactcctgacctcaagtaatctgcctgcctcggcctcccaaattgctgggattacaggcgtgaaccactgcgcccagcctcatttttctttttctttttttttttttccttttttttttttgatatagggtctcgctctgtcgcccaggcttgactgcagtggtgcaatctcacctcactgcaacctccacctcccagattcaagcaattctcctgcctcagcctcctgagtagctggcattacaggcatgtaccaccacgcctggataattttcgtatttttagtagaaacagggtttcaccatgttgtccagcctggtctcaaactcccaacctcaggtgatccacctgcctcggcctcccaaagtgctgggattacaggcatgagccaccatgcctggcctcatttttcttttcctttttttttttttgtttcttttctttcttttttttttttttttagatggagtctcactctgtcacccaggctggagtgcaatggcatgatctcagcttactgcaacctctgcctccaggttcaagcgattctcctgcctcagcctcctgagtagctgggattacaggcacatgccagcatgcccagctattttttgtatttttagtagagacagggtttcaccatgttggtcaggctggtctcgaatttctgacctcgtgatctgcccaccttggcctcccaaagtgctgggattacaggcgtgagccactgtgccaggcctcatttttcttatttaaaagatgtatagcctaatagtgagtgtaaggtacatcattgtagatttaatatgcattaacataatgatgaatgatgttgagcgtattttcatggtcttattgattatttatatcttttggtaaaagttttatttaagtcctttgtccattttttcattggataatttcggttgtttgtaatttgagttgtaagtgctctttatatatgttggatactagacccttaccaaatccatgatttgctaatatatgctcccattttgtgagctatcatttcacttttctgatagtgtcaatcactaaacagaattttaaattttgataaagtccaacttacatatcatttctctacccaaccattggacagtcagggcatggtttatggtaagccctgggctcatgtgatctcacagccagggatgcctgaagggtctggagaaccttccttttcttatgttcaatatggacacagattgtggcttgtcaagtgaatcaacctcatcccacttttttgtagggaaatcaaggcctgtgacaaaggtggttcttgtggccattggggaggcagctgtgaagatcctgcttctctgcctctgcctcaccttcctcaggtgagcactgccccaggggaagtgtgtggagggcaggagacatgatgctgaatcccagaatctcaatcatggagatactcaaataccttaagagcacctaggaccaggcaaggagctcaactggtggtgagaattccacatggttcatttgtagtcaggcctgtgtctgtcccaacccgaggccaaatgccagggtggagaggtttctgttctcataaagaagatcttgagggctaggcctgctctgtctaccacattttctatcagcccctttgcagcgcacagggaggtgagtctgctgccctctgcaccccaatctggccacacttatatgccccgatctcttcactcagtgtgaggtcctgcaggaggaaggtggcaaaggcagcagcagctgtggaggctgaaaacactgccatgggctaatctctcaggtgagtgttgtggacgtctcaccctccaatatcgtgctggatgacttctttctgtggcccccaggatagctgcactcagcatggccaaagttgaacctcccatgtccatccccaaacccacttctctttagccccatctctaaagtcagaaccagcttgtgggtctccaccttgacctccccaccttctccagatctcataaatcacccactcttgtccctctttctcccaaccagggctcatttggtgcccttttctccgtcctgaccttggtcatgcctgggccctcacctcctccctggtcactgaaccatcctcaccttttgcctccctgtctccccagcacaggcctccagactctgcttctagctgcctcctcgtccagtgcctccacagtctgaacagccttgtctccttgtttcctctccattgctggagaacaccaccgtctggactgaaggccttgcacgttctatcctccactggactctcctgatccctcctttctctgtgtcacccaaagtctccccacacccactgggccaagccctctatgactctgagactttgcatgtgtagttccgtttcctgaaatgcccttccctcccattcctgccaagtccaggtcctgattgtccttcaggctcagtcttaaatgtcacccgagtgtgtgtgtgtgtgtgtgtgtgtgtgtgtgtgtgtgtgtgtgtttcttgtatgatattgagggaaggagtgacatttattcattaatctatagattctttggtaactatactgaacacctactatgtgccagcattgttgtaggtgccaggggttcactggtagacatagcatcagaaatctcagtattaagaagatgttctgggctgggcatcgtggctcacacctgtaatcccagcactttgggaggctgaggtagtggatcacctgagatcaggagttcgagaccggcctgaccaacaaggtgaaaccccatctctactaaaaatcaaaaattaggtgggcatggtggcatgtgcctgtagtcccagctactcgggaagctgagacaggagaattgcttgaacctgggaggcagaggttgcagtgcgagactctgtctcagaaaaaaaaaaaaagatattctgaagacaagatggacataaaaaaaggaataagcaatagaaagtatttaactatataggatggcaatatatgtttagagaaaaatcatgcagggaaagaagcataagatatactggggaaccatctctgtacctgatgatgggaagagattatatttgggctaacacatgaaggtggtgaggaagcaggctctgtgtgtatataagcaaaagcatcccaggaagaaggaaaagggggaagagcaaatgcattgctcagaggcagcagtaggcctgggtgttgcaaacacacccagtaacccatgtctaagagcagagggaggcagaggagtcaagcggtggaaaggacactgcagaccacctggtgccctgcaggccacacaggaacctagagcctttgtggagaggagagactcaactggactggatcccttggctccctggcgagagcaggcctgagcgggtcaaggcacctacagacagactgggagagcgctgctggatcctccaggaagaggaatgaggtcttgaaccagacaggcagggttggagtgaggatgtgtttttggatgtatttggaaggtcaagctcacaggattttctaatggatatagtcattgaggggaagggaagagcatggataaagccagaatgttcctctgaacatctcactctttcgaaactccaatgtcttttttgtttttgttttgttgttgttgttgttttgttttttttttttcttgagacggagtcactctgttgcccgggcttgagtgcgatggtgtgatcttggctcactgcaacctctgcttcccaggttcaagctattctcctgcctcagcctcccgagcagctaggattacaggcgcttgccaccacacccagctaatttttgttgttgttgtatttttagtggagacagggtttcaccatgttggtcaggctggtcttgaactcttgacctcaagtcatccaccaatcttggcctcccaaagtgctgagattacaggcatgagctaccactcctggcctccaatgtctattattccacactctatgcccatgtatacacattatttaactacacttatacatgagaacatatgatatttgactttccacttctgaattatttcagttaagataaccttcagttccaaccatgttgcttgaaaagacatgatttcattctttttcatggctgggtagtattccattgtataacccccattttctttatccaatcatccatggataagcattaggttgattccatatctttgctgttgtgaatagtgctgctacaaacatacgagtgcaggtatgtttttgatataataatttcttttcctttacccagtagtgggatcattggatcaaatggtagttctatttttggttatttgagaaatctctctgttttccgtagaggctgtaataatttaccttcccatgaacactgtataagcatttcctgttctccacatcctcaccaacatctgttatttcttgactttttaaaaatagccattctatctggtggaagatgatttctcactgcggttttaatttgcatttatctgatgattagtgatgttgaacctgtttcacatgcttcttggccacttgtatgtcttcttttgaaaactgcctattcatgtcttttgcccactatttaatgggattttttgttttttattattaagctgcttcagtttcttgtacattctggatattagtctcttatcagattcacagtttgcaaatattttcttccattctgtaggttgtctgttcactctgttgattattttttatgctatgcagaagctttttagtttaattacatcctgtttatctattttttgttttgttggatttgctttgagatcttagttgtgaattctttgcctacgccaatgtccagaaaagattttcctaggttttcttcagtatttctatagtttcaggtcttacatctaagtttttaacccatcttgagttaatgtttgtgtatggtgagagataggggtccattgcattattctgcacatggctatccaattctcccagcaccgtttaattaataaggtgtcctgtccccagtgtatgtttttgtcgactttgtcaaaagtcaggtagctgtaagtatatggctttatttctgggttctctattctgtttcattaatctgtgtgtctatttttataccagtaccatgcttttttgtttactatagccttgtggcataatttgaagtcaggtaatgtgatgtctctagctttgttctttttgcttaggactgctttggtaatttgggttctttttgtttctatatgaattttagaattttttttcaaattatgtgaaatatgacattggtattttgataggaattgcattgaatctgtagattgctttgggcagtacggtcattttcaaggtattgattcttctgatccatgagcacgggatgctccatttttccattcatctgtgtcatctacaacttatttcatcagtattttgtggtttgccttgtactgatctttcacctccttggttaaatatattcctaggtatttttctgttgcaattgaaaatgagattgacttcttgatttttcttctgttagattactgttggtgtatagaagtgctactgatttttgtacattgattttgtatcctgaaattttactgaattaatttattaaatctaggagtcttttgaaggagtccttagagttttctagatttaagatcctatcatcagcaaacagagataatttgacttcctcttttccaatgtgggcgccttttgtttctttctcttgcctgattaattgctctagataggactttcagtatcaggttgaatagcaatgaagagagtgatcatccttgtcttgttccagttcttagggggaatgctttcagtttttaccctttcagtatgatgttggctgtgggtttgtcatagatggctcttattattttgagatatgttcctttaatgtctagtttgttgagggtttttaccatgaagagatgttggattttatcaaaagctttttctttgtctagtgggatgattatatggtttttgcttttaattctgtcaatgtgatgaatcacatttattgatttgcatgtacggaaacatccttgcatccctggaataaagcctacttgatcgtgacgaattatctttttgatgtgctgttgaatttggtttgctagtattttgttgaggatttttgcgtctatgttcatcagggatattggactgtaatttacttttctcattgtgtccttgctaggttttgatatcacggtcatactggcttcatagaatgagtcagagaggattccctcctcctgaatattttgggagagttattctttgtacatttggtagaatttgactgtgaaaccatctggtcctggacttctatttgttgagagatttttttctattgctggttcaatctcactacttgttattggtctgttcagcatttctatttcttcctgattcaatcttggcagaatcttatggttctaggaatttatgcatttcctccaggaaaagttcctctccatgttttgaaacaaaagatattattctctcacagttctggaggctagaaatttgaaatcagtaaggccaggcagaaatgaaggtgttggttggactacaacactccagagacttgagaggatccatacctcgcttcttccacattattgtggctggtgtcattccttgaattttggctggactgctcctacttctgtctctggggccacatggcctcgcctccttctgtgtatatcacatctccctctgcttttctcttatcaggactcttgtaggactcttgtgattagatgtaagggttgactgcataatccaggatttccactggtcaagatcattaatttaattaaagttgtaagaatacctataaagtaacaatacaggctcaagaaactaagacccagttttctttgggggtcattattcagattactgagccgctgtgtgatcttctgccccctaggaggcccccatctgccctccagaccttgccttctctttctattactttctctgttctttccgtcctgacacactagtgggccaactcatgtaacgcgtatttatgggaatggggtctattataccataaaagacactgataagacagccaaaagataagttacagggtgataacacctgaatataggtatctgatgaatgacttgtatccagaatatatcaaggactctcaaaacaaaaacataagtaaaccacaacagcaacaacaacaacaaaaggcccaattttgtgtaaatgaaaaagcagccactcaacaataacaaaaaataaacaacacttaaaaatggacagagggtgtgaatcacatttctcaaaaaaatatagtactcaaggccctcaccagaagcaaatgccagcaccacatttcttgcacagcctgcagaactgtgagccaaaatatatctgttttcttcataaattactcagtctcagatattcctctatagcaagccaagaatgaactaacacaatattttaaaaaggtagccaaaggttttatcagccacctcaccagaaaagaaaaacagatggcaaacaggctcatgaaaacatactaaagatcatttgtccttaggtaattataaatcaggagaataagcattcttaggtagcattacatacctgagaacataactagaaaacaaaacaaaaataaaaagaaatgtttaaatattctgataatatcaaatgttaacaaggatgtgaaacaatcagaattcacacataactcctggtgggaatacaaaatggcacatcaactttggagaacagtttgacaatttcttataaatttaaactgaacacttaccataggaccaggcacctgactcctaagtatttacccaagagcaataaaaacttacagttacacacagaaacctgcatgccaatatttataacaacattatttcatagtcacccaaacctgaaaacaatctgaatgctcctcaaatggtaaatgcatacaaaatggggggtccataaaaacagtgagttacgagtcagcaattaaagggaacaaactatagattcatacactcaaccacatgattgaacctcagaggcactgcaccaagtaaatgaagccagactttggaggcaacattttgtatgattccatttatacgacattctgtgaaaaggcaatacagtagggatggaaaacatatcagcattttttcatggactaagtgtggagggagggttgactacccagagacaggaggaaggaacgtttggttaatgacactcttcagtgtcttcacagtggttgtgggtatataattatatacaactctcaaaccatatcaaaattgcatatgataaagagttaattcaactgtatctaactttaaataaattaaaaaatttaaaacactggatgccactatgctctcactagaattgttcaaatataaagcaggacagtatcatacgtcgacaagggtgtggagctactggaattctggcacatggctaggaggagtggtaaaaagtcaaaaccattttggacaacagtttggcaattcctactaaggttaaacttacaagtagtcattagtctgactatttatcttcctgtgtataccaattagtataaaaccatgtatgtaaaaagacttgtacctgaatacctgtagggagaaaactggaaaatccttgtctatcaataggtgagaaataaaacattatagtatacacataaatggaatactacttaacaatatcacattttgaaatacagacacaaacaacgtggttcagtttcaaaaaatattatgctgggtcataggatacagacacaaattaacacatctctaggagattttcaaatagactaactcacaatgaaagaggacatatcagtggttgcccagcatagaaggtgggaagaaaagcccttggcatactagaaatgctgtatatctgcagtgtggtgagtatacaggctgtacatactcgtcaaatctcatgcaaatgtgaacttcaagtaggtgtgctttatttcatgtaaattatacctaattaaattcattaaagaaacacagtaagactcacatattcatatttgatcttctggtccatgaacatagtatgactttattgttaaaactaaatgtggctgggcacagtgcctcatgcccatagtcaaagcactttggaggtcgaggtgggaggattgcttgaacccaggagttcaagatcagcctgggggaacatagcaagaccccatctctcctaaacataaaaacaaaaagttactccggcctggtagtatgagcctgtgatcccagctactagagaggatgacgtgggagagtcacttgagtctgggaggtcaaggctgcagtgaactgtggtcaggccggtgcactccagcctgggcaacaaagcaagaccctgtcttaaaaaaaaaagcactaaatgtattgaattttctattacgtgccacatgctaaatatttaaataacttacaacagatattatttactggagacttaatttgttgtatatcaaatgaggatgcagctacctctctattagtaaggatgaatgaagagttatctagatactattgtgtgtagagatttgacaaaggtatggtggcaagtactaatatgtcccagggatcaacggtttgctggatgcatactacacagagtgatatggaaaaccatgtagctggacctaaagtttaattttctctgtacactccactcatgttgtctggaaatattatgtctttgggccatatttaactgtgagaagcagatttttacatgaaagaaaatgttgatccatatgatgagcctctaaaaaaacttgcttctgcccacactgaaccaaatggcagcatgaatggaaaagaagttttttctgcactggttcatagaacatgtgttctcccttttgtttcacaggaagatgctgcatggttcttgttttggagatgtcattgacactgtgcaaatcagtgtactaggtgccaggggaaaattctatagtcatatttcttttaaaatttccaatatgctaccatgatacatggcaaattcccaacttttcacagctctaaagccagacagcatgtgtgtgtgtggtgaggacatgaggctatggatggggagtatcttaagggcaggaatcaggtcagtggcatctcttctcaagccccacctatacacaaaggctcactgtaagaattaaagaaagaggaaagaaacacgaatggtggctcaccagtcaagacagattttagagaaaacaaacctgagaggagtttctggccgagttaagtcagaggcacactctcttacagactaagagtttttaaggatttagggtgggagagtttatcagagacttggactgcttctgagtctctttgttgtgcttatctgggagagagaggtgtgtgtctgtacccatacatctttctgcagctacaggcatacccactgagtctgcttttagcttccctatcttagtgcacctgaagggaaaggaatttgcttattaaggcccactgttttactagggccattgtatgagggtgaagtttggcagtaactcaagagactctccccctacctccctctgtgcccgagctgtcttatctgtgtttcactgtctgctctttctggttgcttgtagttagcagagaagtgatttccttgaaatgcatgaggctagaaaggaaattggaacttaaagaggcagtgtttctccgagatgacggtgctcctgctctgtcactcactatatctttagtgaatgaatgaataaatgaatggctgccaccttcactttacctaggactcttctttgtttctctgccccagacactcacacggaccctatagaatcctatatcctgctggactaaacaccccatggatctaggtgaggctgcgactcgggccaggccagcagtgatcagccctggtgtaaacagttgtgcacagaaaagcacctcagagtggaaggactttagacatggggttcgcatgtctcagatggccctgaaggtactgatccaggctctggtgctcctggaaggcaagactcagattctgctccatctcctcccatctctgggcgggtctctggcatctctggcccatgagggtcaatctgtgtggaggggacaagctctgagcatgtgtgggtctgaggttcctcttccatgcagggctgaggtctcctgctcctccccagcttcctgtccggccctgtagtccttcccctccactcccttcctcttttctgctcacacaggaagccctggaagctgcttcctcagacatgccgctgctgctactgctgcccctgctgtgggcaggtgagtggctgtggggagaggggttgtcgggctgggccgagctgaccctcgtttccccacaggggccctggctatggatccaaatttctggctgcaagtgcaggagtcagtgacggtacaggagggtttgtgcgtcctcgtgccctgcactttcttccatcccataccctactacgacaagaactccccagttcatggttactggttccgggaaggagccattatatccagggactctccagtggccacaaacaagctagatcaagaagtacaggaggagactcagggcagattccgcctccttggggatcccagtaggaacaactgctccctgagcatcgtagacgccaggaggagggataatggttcatacttctttcggatggagagaggaagtaccaaatacagttacaaatctccccagctctctgtgcatgtgacaggtgaggcacaggcttcagaagtggccgcaagggaagttcatgggtactgcagggcagggctgggatgggaccctggtactgggaggggtttaggggtaaagcctgtcgtgcttagcgggggagcttgaccagaggttgatcttctctcaggccctcacctggaccctccctcctgattctgcatcccctctttctcctcactagacttgacccacaggcccaaaatcctcatccctggcactctagaacccggccactccaaaaacctgacctgctctgtgtcctgggcctgtgagcagggaacacccccgatcttctcctggttgtcagctgcccccacctccctgggccccaggactactcactcctcggtgctcataatcaccccacggccccaggaccacggcaccaacctgacctgtcaggtgaagttcgctggagctggtgtgactacggagagaaccatccagctcaacgtcacctgtaagtgctgggccaggatgctggggtccctgagggtgtaggggagacaggatgggctggtgctggggacatttagtgtcctggaggcctggctgagttcgggagccagaaggacatgagccctgtcccttctgcatttctgtggtttctggcaggagtaaggggaaatgcctacccttatctcatctctacccccaactgaaggaaatcctctcttcctctcctagatgttccacagaacccaacaactggtatctttccaggagatggctcaggtaggaaggagcctccccgcctggggctgttactgacattgagtctgtgtcaggtttggtcagatctggactttcagagtcaaatgttcagaggcaaggcctgcagttagacacgggtagacatcaggcaccttggaaaaggatatttggggatgactagcaacttcccccttgcccatccaaataatgctctttgtctccctcctgtctctgaatgtcttggggtattttatttttaattgatatgtaataatagtacatatttatggatggcatagtgatgtttccatactaataatgtatagtaatcagatcagggtaatagcatatccatcatcttgaacatttattatttcattgttgttgggaacattcaatatcccctttctagctatttgaagctatctattattgttaagcatagtcatcctacagtggtatagaacaccagaacttattcttcctttccaggtgtaatctagtatcctttaacaaatctctctccttatcattgttcccctaaccttcccagcccttattattctctgttctactttttacttctatgaaatcaacttcttgtagcttccacttatgagtgagaacatgtggtattcaactttctgttcctagcttatttcatttaacataatgtcctctagttcaatctatgttatagtgaataacaagatttcattattttttatggctgaatgataatccattgtgtatatacgccacatttcctttatttattcatctgttgttggacacttaggtttatttcatatcttcctattgtggataatgctgcaataaacattgaggtgcagacgtttcttcaatatactgatttcctttcctttctataaatgcccagtagtggggttgctggatcatatggtagttctatttgtagttttttgagaaacttccatactcttctccatagtggttatactagtttacattctggtcaaaagtatataagagttccctcttctctacatcctcaccatcatttgttaattttcatcttttttttatcatagtcctcccaactggggtgatgttacctcattgtggttttgatttgcatttccctggtgattggtgacgttgagcatttttcatatacacttgttggccatctgtatatcttttcttgagaaatgtctactcagataatttgcccatttttaaatgagattgggtttctttgccattgagatgtatgagttcctcgtatgttctggatatgaatcacttgtcagatgaatagctgacaaatattttctcctattctgtaggttgccttttcactctgttggttgtttcctttctgcatagaagctttttagcttgatatcatctcatttatttacttttgcttttgttgcttgtgctagtgaggtcttactcataaaatatttttccagaccaatgtcctaaagcatttcccctatgtttttttctagtattttttaaattttgtgtcttatattcaggtctttgatccattttgaattgatttttgtataggacgagaggtgtgagtctaatgtcattcttctgcatatggcaccagttttcccagcatcatttattaaagaaactgctctttcctcaatgagtgttcttcatgcatttgtcaaaattcagttggctgtagatcgtggattaatttcggtgttctctattatgtattattggtgtatgtatctgcttttatgccaatatcatgctgttttggttactacagctttgtagttttgaaatctttaaatttttgaaattttgaaattttctagttttgaaattttgaaatcttgtagtgtgatacctccagctttgttcttttttgcttgggattgctttgaccattcaggctatttttagttccatatgaattttaagattgtttcctctaattctgtgaagaattacattgatattttgatagagccaggtttgaatctgtagatttctttgggtagtataatcattttagcaatattaattcatctgatgagtaaggaatgtctttccatttgtttgtatcctcttcagtttatttcctcagtgttttgtagtttttcttattaaggcttgtcacctccttggttaaatttattcctaggtatacttcattctcttatagctattgtaaatgtgattgccttcctgatttattttcagctaattcattgtgtgtagaaatgctactgatttttgtatattgattttgcatcctgcaaatttactaaattcatttatcagttctgagagttttattgttagagtctttaggtttttgttttgttttgttttgttttgttttgtttttgagatggaatttcaccatgttggccaagctggtcttgatctcctggcctcaagcaatctgcccactttggcctcctaaagtgctggaattacaggcatgagccaccacgcctggccaagtctttaggtttttgtatgttatttgcagagacaatttgacttccgcctttccagtttggatggtttttatttctttctcttgcctaattgctctggctaggactttcagtactatgtaaaataagagtcataacagtggacatccagttcctagaggaaaagatttcagcttttctccattcagtatgatgttagccatgggtttgtcatatatggccttttttgtgttgaggtactttccttctatacctaatttattgagagtttctatcatgaaacaatattgaattttaacacatgctttttattctgcaactatttaggtgatcatacggtttatgtccttcattctgttgacatatgtataacatttattgatttgcatatgttgaatcattcttgcctttctgggattaatcccactttatcatggtatgttatctttttgatgtattgttggatttgatttgctactattttgttgaatatttttgcatctatgttcatcagggatattggcctctagttttctttttttattgtctcctttctgattttggtgtcatggttatgctggccttgtagaatgagttaggaagagttgcctccacttcaattttttggaatagtttgagaagagttggcataatttttttttctttaaaggttcagtaaagttcagcactgaagccatccagccctggaattttctttgttggggggccttttattattcattcaatctcattacttgttgtttgtctgctgaagttttctataccttcttgattcaatctcggtagattatatgtgtccaggaacttatccatttcttctagactttcaaatttgttggcatattgttcatagtagtgtctaagatcctgtgtatttctgtggtaaccattgtgacatcttcttttttatttatgattttattaatttttatgtcttctgtctctttcttagtttagctaatgattgtcaattttatttatttttccaaaaagcgaacttgttcattgatttttttttaatttcatttatttctgctctgatctttatgatttctttcattgtgctgattttggatttggtttgttcttgctttctagtttcttgaaatgcacagttaaatggtttacttgaaatttgtctaattgtttgatgtaggcatttatttctctcaagttgtctcttaaaactgtttttgctgtgtcccataggttttggtatattttatttctatttttatttattttgagaaatttttaaatatcattcttaatttcttccttcactattggtcatttagaatcattttgtttcatttctgtgtatttgtatagtttgcatgtttcccttggtattgatttttagttttattcaattgtagtcaaataagatacttgatacattttggtttttaaaaatttttggcacttgttttgtgttctaacatatggtcgatccttgggaatgttgcacatgctgatgaaaccatgtgtattctgcagctgtcggttgaaatgttctgtaaatatcttaggttcatttggtatatggtgcagtttaaatccaacgtttatttgttaatcttgtctagatgatttgttcaatgctgagagtggggcgttgaagtcctcaactattattgtattggagtctatctctccctttatatctaataatatttgctttacatatctgggtgctctggtgttgtgtgcatatgtatttacagttgttatattatagtgctgaactgacccctttataataatataatgtccttctttgtctctttacagcttttgacttgtagtccgttttgtctgagataagtatagctattcctgcttcctttcatttccacttgggtagaatatctttttccatctcttccttttcagtctatgtgtgtcttctaggtgagataagtttcttgtaagcagtatatagctgtgttggtagaagggctgaggcagggcttgcttgtctgacataatgtaaaagagtcttggaacatgtcctgggtccagggtctcaaacccctcgtggcctatggaacaccaagctctgtgcctaagggtggaaggctgccctgccacactgcaatctaagcccagggcataaaacccctcgtggcttggaaagaatccagggctctgggcataaaacccctcatagcctctggaatgtgtccagacttgctggccccttgctccttgctctcccaggatcataaattgattgtatcttgagtgaaaagaacttgttctccattatttcaagtagcagagcatatgctaaaccgtcacagctatgcttgatgcaccgctacctttctaccccaaagtcctcacgttctcacttgtctatccccacttctgcacgtcctcaccacctgcttctttgtttgattaccaataaatagtgtgggctcccagagctcggggccttcacagcctccatactagcgtcggccccctggactcactttatgtactattaacttgtcttgtctcattcctttgactccgctggacttcgtggcccccacggcctagtgttggatctgatcaccccaacaagctgagtctagattttcttttcattcattcaggcagtccatatattttaaatgggacaatttaatccatttacatacacattattattaataggttattttcatttcattgattgttttctgattgttttatatattcctggttccttacttcccctcttattgtttctttttgtggttggctgatgttttttttttttttgtagtgataagatttgattcctttctctttcttctttgtgtatgggctgtcagtgagttttaagttcacgtgtttttgccttttcacttccagatgtaagactcccttgagcatttcttttctttttcttctcttatttatttttattattttttttttgagaaagtgtctcactctgtcgcccaggcaggagtgcagtggcatgatcacggctcactatagtctcgacctcctgggcttaagcaatcttcctgccttaacctcccaagtagctgggactacaggcatgtgccaccacgcccagctaatttttgtgtttcttgtagaggtagggtgttgccatttgcctaagctggtctcaaattaaagagctcaagtggtccacctgcctgccttcacctcccaatgtgctgggattataggcatgagccacactgtgcctggccccttgagcatttcttgtaaggccagtctaagagtgattagaattcccttagtttttgcttatctatgaaatattttatttctccttcttttctgaaagatagcttttctgggtatagtatttttgactgttaagttttttatctttcagtactttgagtatgtcatcccattctatcctggcctatataatgttactgctgagaaactcactgttagtctaataaggataatcctatatgtgactagatacttttaccttgctgtttttacaattctttacttgacttttgacaatttggcataatgagctttggagaggacttgcttgggttgaatattttgagagtactttgagcttcctggacctggatgtccttctagttcccaaggcttgggaagttttcacctattactggattaaatatgttttctacaccttttccattctcttctcctcctggaaataccataatgtgaatatttgcttgattgtgtcccatgagtcctgtaggtttccttcgttctattttattctcttatttttacctgcctgtgttatttcagaagatctgtcttcaagttcagaaattattttttcttcttgacctagcctgttgttgaagctctcgattgcggttttttatttcatttattgagttctcagctgtaggagttctgctttgttcttttatataatatctatctctctgttaaatttctctttcaagtcatgaattaaaacaatgggacacaggtgcccaactacttggctgacctgggggcatatctgctggaggtgccaacatggctgttttgcagggctgagatgaagctgaatgactcttggctggcctaggtgtgtttttgccaggagtagcactcagagctttatctagggtttgggatgtgagtgtaagactgctcagctggcctagggggtgtaccagccagtggtagcccatggggctgtttctcaggcctggaatgcaagcacattctgcctggggtcatgtctaaaagggttggctcacaaggctgtttctcaggccctaattgtgggagagtggcctttgggcaggccagagtcatgtccacagaaggcgtctgggcaccgtaaggctgtttctcagagcctgtgtgtgagcacataaccactaccccagcctggggatgtatcaactctttgttggctcagaggtctctcccattcaggtgagcatgcacagtagtttggccaactcaattgtgtgttcgccctgagtgggactataagacctttcctccagctggaagtacgggcagcaggggttggtttctctgctgttcagggccagagtcccagccaatcctgggcccaggctccatgcagctctaattgtggtattcagccactactgcaggtttagtggaatgaagatgcacaatgataaagaggtgcatgccactggcccccagaggagggtgcactccagagatggctgtggtctcaagatggttctgtgttgtagcagcttgcccgcaggggctggttagggagttgggagtgcacaccaaatgctccatgcagctgtgtgaattcctggcagctcttccaactgtgctcagagcttgtgaggactgtaagattaacctgtagtaaggaatgtaggtatctgcagtggcactggaggttggttggattcctctgcttatcatttccctacaaggggaaatccttcctgtctctgggacaaaccaatctgggctggggagatggagctgcaaagcccgggtgcctccatgctgccctcctgggtttccaattaccacaggtaactctccactcccttgctgcactacactactctcccttcgacactccactcaaatctttgctgtggtttattcattgccttggtcctttcttgtctggtgacacgggggaggatgagctccaggcacctccggtgagccattttgctccaatgggggcatttttttttaataggttttatttttcagagtagtttttgtttcacagcaaaattgagtggaatcttctagtcgctgatcatcttgggagcatttataaatgaaccttatttttcatgaagaaattgagcagaagatactaagacttcccgtatgccctctacccttacacatagtttccccggccatcagcatcccccatcagagtggtacatttgttacagtcaataaaactacattgacatatcattgtcacctgaagcccatagtttacattaaagttcactcttggtgttgtacattttacaggctttttaaaaatgtataatgacatgaatccaccatgagagtatcatatagaatagtcacacttccctaaaaatctctttagggcatttttttctactgtccatacctcaacccttagccctggcctctgtccaaagaccagtgctctctccactgccctattccaattaataatggcatctggcacctcagtggacagtgagcccagtgagagcaggaacagttccctcagtagtggttatcaaactgttaacaatgatgctcagagacacgcccctgactctgagtgttgggacctagaaggcacagccaggcaggtccaggagaactgtctgggtctaagaaggtctgagaaccacctccctgccccaccctgcttccaggccctttttaaggccaaaaggaccacctttgaccctaagtgatggggccagtgggaagaaagaagagacaaggcctatcagcattccagtgctttctctctctctcatccaagaggctcagagcttcacagtccttcaggggctatgtctgaggttcatttcagaaagacccagggtggagaggaacctgagtcctaggagagatgatgttttgtgcaccagagagagagggtgggacaagaggtgtcaggtgcactgtgtacttcatctcatggtcgtggtcaatattgatgtctatgatgggtgggaagatctaggagctaaaccccattttggaggtgaagtcacccctctctacatgctggagaggaggatacacatacctgtttatctagattagaattcaccccaaatcttttttgtctgcagggaaacaagagaccagagcaggagtggttcatggggccattggaggagctggtgttacagccctgctcgctctttgtctctgcctcatcttcttcatgtgagcattttctctgggtcaggcatgggccagaggtgaagaggatggacctggtgtagaagggtcctggaggggctgtgagggctggagaaagggcagggggtgtgatgatgtacagaatccagcctgtggccactgggataggcgtgggtctattccagggccctgatctcagatgtccaaggagtgggaggtagagggagaccttgtgactaagtcttgtttgagggctcctggattaatcccaccctttacctgccaaagtccctcattccaggctcataacaatggccccacagcctgagaaaaccaggctcaaagaccctggtgtctcccatcagagtgaagacccacaggaggaaagcagccaggacagcagtgggcaggaatgacacccaccctaccacagggtcagcctccccggtgagtgatggggcatcctggcatccagtctgtcctgcagacacctcctcccaatgtggcccaccgtcatgccccattcagcatttccagaactgagcttattgtctttcctcctgtttaacagtgtaggttttaatatttttcaggtacgttgaggccaacagatcaggagatgatggccattgaaaagatagtttcttggccgggcacagtgtttcacacctgcaatcccagcacctttggaggccaaggcgggcggatcacgaggtcaggagattgagactatcctggctaacatggtgaaaccccgtctctactaaaaatacaaaaaattagccagatgtggtggctggcgcctgtagtcccagctacttgggaggctgaggcaggagaatggtatgaacccgggaggcagagcttgtagtgagccgacatagcaccactgcactccagcctgggtgacagagagagactctgtcccaaaaagaaaaaaaaaatagtttcttattcaccgttcccgagagggcacaccacaccatgcaaggccatatggagaagcaccagggtcagtcaggaagcagagggagcaaggagaaaatgggacaagagccttcactgtggctttcatggaaaagaatgggcaagacagggtaagcaagctaggcaggtttaggattggctacttagaacaatttcagcagactctggggtataggagttgtctctagttgtctggtacatggccctgggtttattaaggaggattgtggtctggagtgtaagagctcaataaaggatccagctggtagtgtgggctttagattgactggtttgcacatgaaaggtgcacttgtatgcaagtcctttattagctctagaaatctactatccttgggaaaggcagtctctcaagggtcagtaatgccccagatgtcaaaacatcagaaacacttggttgacacacccctaaacatacttctcctgatgggttctccatctcgctgatggcactcttgtccccattacccaaccagagacatggccccctcctgtcccagtcctccatctcttcctgtgccagtatgctacgatgcatgtctgagcttcctctgaacacggcttaacacaaccactcctgagccgagagcccctcttactccttattctgctgcagcctcacctcccatttctcctctccagaacattagcatcacctccctaaaaggtcattgtcccatcattcccaagtttgaaatgcactgcttctctacactcctgaaagattggcattccaacaacttggtctggcatttggagcaggaaaaccagagtccccttcagtgctatgctcccccaacattagccactcaatcacctcaagcagggcaagctttctcatctcagaatcattgctgggctgtcccctcctcctcatatgcctaatagctacctgcccaactccagtgcatccttcaagctctgattttttttttaatttatttaactctgactaaagtgaacaccacagtaaagtttttgaacacagggtcaaccagcacccattcattctgaaatatctatataatcccatttgccaattgctctaggtccttgtgccattctgtatttttataaacacacagtttacaaatataaaatattcctcctatcgggggcttaacatttattggggaaagggatgaaaataatgaacaaataagcagtgcaaatatacatgaaataggcatgaaataagtgctatggcaggaaatgaaatgggagaacggattggacagtcctgggggccaaagaatggcctttgggcaaacacctgcagaaagaaagtgagtacagtatgagcagtagagaatcatcaaggaagcagcaagtaccatggctctgaggccggaacacatctgatgttttagagaaacaaagtaggacagtgtggataaggcagagttacgtgttgggggtggagtgtggactgaacaatggtaggtaggaaatgaggttgaagagacataggagctgcaaatattgcaggatcctaagtccatcatagttattgatgcgtttagagcagaagagtgacatgaactgacactcattttagtgggagtcactctggctgctctgtgagaaactctagtatgtagtatagaagagaagataccagaatagaagatacacagataatcaagccaagagatgactgactcagacttagtcccaagtaagaataatgaatctgatgtggagaaattgggttccggatacatcttgaaggtggagtcaacagtatttgcaagtggagtgatggagtgcatgcaaggcatgagcaaagatagctcacgggctctgctcgataagtgtctcagatgtcataggtgggtccacagatatcatagatgtcatggatgtccaagaagaccccatagatgtcatagatgtctatagatgccaatgatgatgttcatgtggttaactcagaattcaaacttaaaaaatcaaattgccaatgattaaaattgccatccttgaaggagaagtctattttcaagtgtatatcaaacattattttggttaccgtaagtttgaggtgcctctgagacatccatgtggagatgacaagtagcaggcaagtgtctggagctcagaagagggctccacgtgggagacacagaggttgggagcttccctatcaacatccaataatcgatgaatctacaaagaagagaaggggtccacagacacagccctggaaccctccagcatttaatgttagggagatgaggtgtaaatggtgagaaagctgagaatgaataggagccaatgaccaggaaattgcaggctgtagtgttggtggccaagggaagatggggcttcatggaggagaggttggtcatttgtttcaaatgctggtaagtctggtaagatggaatctgagaaatggctatttgaatgtagctaagtggtatgacagcaaagcagatctgatttttctgctggaggaagatctcttgactagagagagttcaagagagaatgggaggagaagaggcagaaactgtgagttgaaggactcttttgagaaacactgccccaaatctagaaccaagaaatgggcctgcaccagcaaatggttgtaccctgtagacttgccatttctccagcatctgctcctgtgtctcttatgataccatgttccctgtttgtgtagggctttgcaccacttgaactaactgcattcccatagcttcccctaccacaccatgagctccacaaggaaaagcctgggttttattagacctccatcattctactctctcctgttcatctgcacactgtcacaatttgcaattaccagtctgtttctgtcttcatcccctgcagtactggaaatcacagggcccctgctctgctctgctccctcctgaggatccagtgcccagcacataggaggtcccagagacctgggaccgagttcagggtcaacagatgtgtgactttggaaattacctaagctctctgagacctagtttcctggtctgtaaaatggattaaaataatagatgccaaagatgatgtcagtgtagctgcccagaatttttccacattagtctctgtgagtattcaagagaattgcgaatcaatcaatacgtgctacatgtgttagataatgaataagtagagccttaattaattaacatttgatgaaagaatgaaagagtgaataaatgttctgtcagagtcaaatttacttcattgaccctctttgccttctcctggtccccctcctcactgccctgctctaacccccttctttcctctccataagaaacaccagaagaagtccaagttacatggccccactgaaacctcaagctgttcaggtgccgcccctactgtggagatggatgaggagctgcattatgcttccctcaactttcatgggatgaatccttccaaggacacctccaccgaatactcagaggtcaggacccagtgaggaacccacaagagcatcaggctcagctagaagatccacatcctctacaggtcggggaccaaaggctgattcttggagatttaacaccccacaggcaatgggtttatagacattatgtgagtttcctgctatattaacatcatcttagactttgcaagcagagagtcgtggaatcaaatctgtgctctttcatttgctaagtgtatgatgtcacacaagctccttaaccttccatgtctccattttcttctctgtgaagtaggtataagaagtcctatctcatagggatgctgtgagcattaaataaaggtacacatggaaaacaccagtcctggtgcagtgagagttcggtgcatactggttccttcccccttgaacagaagtcattagtgatatttgatctctggaactatatcagcaacatgtccatctcacttgctgctcaaaaccccaccatatatgtcttccctgacttaccctccaacatcatctctctccactcctgaatcttctcttttcatctcacctgtcccctactcggatttctgctttctttatgtcctgctacagggaaaatcacatattagcatttggggaattttctaaaactcagagctgaccatagtgaaaatagttccctagatccccaacccacaggaataatttgaagcttctcaatgtgacattctaagtcagagatggtcaaccagtattagcaaagggccagatagtaaacatgttcagttttgcaagcaatgtggtctctattgcaactatttaattccgccattgtagcaacaaagcagccacagacaatctgaaaatgaattatatggccatgttccgacaaaatgctatttatcagaacaggcagcccacgggctgtggtgtgctgacctctattctatgttgctctgaatctcgctcagtctactcttccattgccacatcctacactctatggaccccattctaatgcattcctccctgtctgtttgaatccacatccctcttccaagaagggctgtcaccatgtcatcatcgggcaccatctttttatccttccaaatgacctcaaaggtagatgtctaaattgagatggcagaaagaagctcacaatcatcctcccaaaaagcctaattaaaatgataaaaatcagtttaagaaaaccagccccaaattcatcagcagcacccaaaccattacagggggtgaaagcattatgccataagctcacaataccctttagataaacaaatggaagattctggtgttgcggtggctcacgcctgcaattccaacactttgggaggccaagcccgaaccctgctaggctgtgcccgcctccgcctcccctgcccatgggagtggcgggtgcccctccagggtccacctcacccagcccagacccccagggtgctctgccccatagatgggaggcaactgcccagggtgcaggggcagtgagggcgctgctggctgagggacatgccccatcctggggagggagggtgagtgtgtcagggaggggacagccctgcagttgtcagaggtggggctggagcagcacaggtttcctctggttacaaactactcctaggtgcatacctaacagaaatgcatacaaatgttcttcaaatatacagaagaatgttcatagcagcactaattgtaatgactgaaaataaaacctacccaataccaatcaacagtaatacagataaataaattatggattatttctgcaatggaagaagcaaataatgactccatacaacatgtatgaatcttagaaatataatgttgagtgaaagaacccagatacagaaagtacatactatgtgatgtacttgatacaaggtttagaaacacacataactaatctttggtgttcaaagtccagatactggtgactagtggggcggaggtcaggggctggtggttagtaacgactagaagggggcattagggagttctgggagattctggtaaggatctgttctttggggattttgtttgtttgtttttgttttgtttttgagacagaatctctctgtcacccaggctggagtgcagtggtgccatcatgactcactgcagccttgacctccctggttcaagccatctttccacggcagcctccagagtagctgggactacaggcgtgcaccatcacgcctaaataatttttttagtttggtgtagagacatggtctccgcatgttggccaggctggttttgaacttctgggctcaagcgatcctcctgcctcagcctcccagagtgctggaactataggcatgagccactgcacctagcccaggatctttttttttgatctggctactaattgctcagatgtcatcactctgtgaaaatttttttggtaaagcacttgtgatgtgttcccttttctacatgcatgttactctttaatcaaatttacattaatatttttataaattatccttgttagtatttagctctgatctccaaactgtcagcttccccaggtcaggaactgtactatgtccagccctgtatttttagagtccagccttggacacagcacatgaagtgtactcagtaaatctttgaaatgacctgaactcaatccaggtgggaaccacaaggttggactctgatgaggcctcacaagttacatttccagcccaggcctctctcctaagctctaatctcctatattctcctgcacatctctccccgaatgacctgcaggctccatgcttttaatgcaccccaaactggactcatctttccttaagcctggttgtcttccaggtttgccatccagaggtgtgaggattcccatctgcagtcacggcacctggtactcaatgcctgggtgtcttagtttgtttgggttactatagccaactaccataaactgggtggcttataaacaatagaaatttatttctcacagttctagagtctagaaagtccaagatcaagggaccagcagattccatgtctgatgagggctcattttctgattcatagacaatgccttctcgctgtgtcctcacatggtagaaaggcagggaagggagctctctcaggtcgcttttataagggcactaatcccattcatgggggcttcaccctcatgacctaatcacctaccaaaggccccaccttcaaataccatcacactggtgattaggcttcaacatatgaatatggggggacataagcattcagtctatctcaatgagcaaggagagcataacacccctgtgccgagttctaacctcccaccaagacaaaatttctggcctacattcatggtttcttgtgaaacaggcctccttaccttccctaatctctcagatcccaatttaggttcctctgcctgttcctctaagaggccactgtttgaaccacttcctgaatctggtgagtttatacctcttcctcctcctcctcccttctcctggctccctctcctctggggactgtgagctccactggccacagtatgaaatacctcaaggcccaagtacaaggtcttctccagcatgaagcatccttcaacttcgcactaccctgggacgaatctggaactccctcctctgggatcccacaggctcccatccatctctccaccacagctatactcccaggatctagaatctgttaaaattgtcttaacgaaggcagcagaaggcagcaattaaaattttcacttccttcacagtagccaaaaattggaagcaacccaaatgtccatcaactaatgaaggaataaacaaaatctggtacattcctgcaatgcatatcattcagacataaagatgggccgaagtacagatacatgctacaacgtgtatgaacttcgaaagcatcacaccaagtgaaagaagccagacactaaagatcacgtaccatatgattccattgatatgaaatgtctagaataggaaatacatttctggaggcagaaagcaggtcggcggttgccaggggcttcgaggagggcagtgactgcttagtgagtacatgctttccttttggggcaatgaaaatgtttagaaccaaacagaggttgtggttacacaacgttgtgtatgtactgaatgccaccgagttgttcactttaacatgttcattgtatgtaacgtgattttacatcaataaaaaaaaataataatttaagctttcaagtcagatctccagcatctgaacacctgcctcaccactgaacctcctgctacttccatttgcttatctgttaaatggggataatagcaccacttagttcactggttcatcctgaggattcaatgaatcaatgcttgacagagtggctggtgcatgccaagcccccagctcttgggggctggtcaaagtgaactcagccactagccaaattcttcaaggtaatgattcgattcactgaatgacctgcaggtttccagctatatccttgtggcgccaggcttttcacttgcaccctgattacatggctgaccctgtggtcacagggaaaactgacgtgcaagatagtaaaagtgaagtataaagtctatttttttttttttgagatggagtttcgctcttgttgcccaggctggcatgcaatggcacgatctcagctcactgcaacctccgcctcctggattcaagcaattctcctgcttcagcctcccaagtagctgggattacaggcgcctgccaccacacccagctaattttttgtatttttagtactgtcaggctttcaccatgttggccaggctggtcttgaactcctgacctcgggtgatctgcccacctcagcctctcaaagtgctaggactacaggcatgagtcacagtgcccggccatataaagcctattttaagtctccatggccagagttttgttccacttctccctttccctcttcacccattcctgtaagtcaccaagttcctggcctgtccccttccccttactctcagatccaggtcccatcttgactcctcttccccagaacatggcaaaagcctcctccccagcctctgggctccagtcccaccccaaccagcccatcaccaaaaccatcagcaatgggagctttctaatactcacctctaaccctgtatctttcttgctaaatatcctcccatgcctgcctctttgcctcaagatgatgttctgactctagtgagagttattcaagcttttcccaggccaggaacagtggctcatgcctgtaatcccagcactttgggaggctgaggcaagaggattgcttgaggccaggagttaacaccagcctgagcaacatagagagaccctgtttctacaaaagcaaagaacaattagacaggtgtggtggcacgcacttatagtcccagctacttgggaggctgaggtgggaggatcccctgagccaggcgttcaaggttatagtgagctagatcacgccactgcactccagcctgggtaacaaagtgagaccttgtctaaaaaaaaaaaaaaggcctggtgtggtggctcacgcctgtaatcccagcactttgggaggctgaggcagggagatcataaggtcagcagtttgagaccagtctggccaacatggtgaaactccgtctttactaaaaatacaaaaattagctaggcgtggtggcatgcacctgtagtcccagctacgtgaggggctgaggcaggagaatcacttgaacccgggaggcaggggttgcagtgagctgagatcgcaccactgcactccagcctgggcgacagagcaagactctttctcaaaaaacaaaacaaaacaaaacaaaaaataactttttacaatctcaccctcagctaccacccctcacacatctcagccacatcctagagattgcatgtccctctgtgcctctccatgcttcattcatgtggttctgtctctttgcaatattgtcccctgccctccttctttgcagcacacactcatcctttgagagctggttcaaacatcacctcctcagacaagctgcattccctaccctgtcccctctcccagcccctgtactttcccacagcttggattagagcagtttatcaactgctgttggtgggccagttcaggttcttgactttgcggcacaaaagaatttgagagcgagtccaaagtaagagtaggcaaagaagtttattacaaagcgaaagtacaccctgagaggcagagggagggagagacagcctctagcatctcaaggtaattcctttcatgggaactatacatacatattcataaaatattggtgagtccagcatgaaaggcatgcactcagaatctatgtgctctaacacgcattgcatgtatcattagcatataaaatctccacctaggggtgtattttctactattcaaatgaggaaaaggtcactataagctaaactttgaacatagctgcacacgcagagccctggagaagttcccagctcccccaaggcaggaatttgtagctcacagcttcttgggtttttggtgttgattggctggagactggggaaactacaccatgaataagtggcttttgttctctttcccaggccacattaacaggaacttgcaaccatctggtggtctgcttgtatcctgtaggactgtttatcttgcaagagttaggtgctgactcacgagagtgaaaaccaaagaatctgcttcgaaagggatccatggggctttgcgcaaggatacaagtgagtatggcctcctaaccttacttatcctgcctcacaacctcaacgatattcatattctggcatttggggctggataattctttggtggtggtggttaggggagggtgtggcaggtcaggtctccctaaccgctgaacaggcaggcctccataacaactgtctcagcactgattgagtggttaagttaaatattaaaagctgacagagccagtgccctcatacaaaggctggaatgtaacaaaagcccaccaagaattttgcccaggccttttctgggccttgagcataacaagataatgaaggaattcttaacaggacccgtttaggattaaacaagttttattggggggtctgaagaaactcctctaagcctccacaaacaagtttattgggggtctgaaggaactccccaaacctccatgatttagcaggagacaagataagggtaatcaccccagcacctggacccatttagtttaaataaatttactgaggctacagaggaagatcttcaggactgacatcttagttacagattggaagaagttaatcgcttacgtccagatgaatgcactcttacatgtagacaaatagcttagaaggtatatgagctctggaaaactttgtaattttgagttggtctggcaatattttccagatcttctccctgtgcccagttacagaaataaactcccttctctcccagttcacctgcatcttgtcattgggctaagagaataagcagcctgacccttggtttggtccaggaacaagggtgcatggtcagatgttgagcagcgtctctaggttgtacacacaagatgtcagtagctcccctagtccagttttgacaaccaaaaaaggactccagatattgtcaggtgtctatcagggtgcaaaaaagcaccaaattgagaaacactgaactagagccttcctcctctgtattcacatagatacttgaacaaaatgaactttctctagttcttcaagttcactacgaaaaccactatgttgcccaatttctttttttttttgagacagagtctggatccatcactcaggctggagtgcactggtgtgatcttggctcactgcaacctccacctcctgggttcaagcaattctcctgtctcagcctcccaagtagctgggactacaggtgcctgccaccacgtccagctaatttttgtatttttagtagagacggggtttcaccttgttaatcaggcggtctcgaactcctgacctcaggtgatccacccgcctcagcctcccaaagtgttgggattacaggcgtgagccaccgtgtccggccgttgcccaatttcaaaacaatttagtgcatttgaagaagtttatcgcaaagcaaaagtacaccctgagaggcagacggagggagagatagcccctagtgtctcaagggtctcaagacccccagtaaaacttgtttaatcctgaacgggtcctgttaagaattcctttgttatcacatttatgaagacggtcttgagaaatcctgaggttctaatttctttgttttccaaacttttcctgcatgcctactacatgctacaccaatacaggagttaagaaggaattacttaggcccagagcaagggcatgggagtccttggtaaggcttttctttttaatgaaaagcagccccaaatcagtttctaacaaagagcagcctgcaacctgggagcttgcatgagtgaatgacggcaggaactaaggaatggacattttcaagatggccgctccatcttcccttctctgtcacgtgctgtaaggagcagacaaggtggcactgatcaactggaaagtccatttgcataagaagattagggtggggttaccagccttccttgtgtgctatttaaacattatacccgatcaaaccaatctatgagccttatgtgaatcagacaccacctcctcaaatgggactataaaatttgcagcattcaccaccagatggtctttttttccgttccaagaccccttcctctttagaggaagcagtttctctttctcttctcttctacccattaaacctccactcctaaaatcctcgtgtgtttctgtgtcctaaattgtcctggcatgtgccagcggaaccccatgtttataccccaagtaacctagctgcttcagctcctccaagaacatcaaaaggaagaagatacagtccctggctcatatgaaaatataaacttagacacattaaaattttaaagaatttatttgagctgacattcatgaatccagaagtgccaaaccacctagtgggcacacaaggaaaacttttataaggtattcctggaatcaaaacaaagaaaatagtttcatttggttaaaggggaacggtagccttaaagtttgtaattagaggtcaacttgcagtttctgattggtaaagtctctacttagaggttagtaggcagtttcgattggttaagcctaagtttcatttttctaggatatgaccattcactttgagttaggtttgaatttgcttacttggaaacaaaggccttggagccatctcagcctaatggcttcccagttagttattttgacaattgggagagctcaagttcatggggtaatgtttgggaaagggacagaaataggtaacttactgaaacacagtatgataaggttcctataaagatggcaaaggatataaattatggggataattatggcctagggtctggggacccaagggcaagagctttcagggatgggaaagaagttagaaaaggcttctcagaggaagcccctttctaactgcaccttgaagggaaagcaagagccagcaagcagagaagcgaggaaaagcagtttaggtactgataatatcaattacaaagcaaggaggtagaagaggggctggcagatgtttaggtaatagcagtcagtctgctacagctagggtaaagggaacaaagtcaggtcccctctcgggaagtctatctggggcctgctctgcaagctgtaagggccatggagtaaggccctggagggtgaacatcatccttcagtctgtcacattaaaaaaaaaaaatctgcacataaataaggcaagattttatccaaaacaattattccaataaagggagaagaatctttgcagcagtggaaggggaactgctgcaacagggaggtggagactgttgtaatagggagtggaggtctcccatgtaccataaaacaaaaccaaaaagtgagcttctattctagtggcacagtcaaaccataaacaaaaataccattagcaaatgatatttagcacaaagtgtttttgttacaggaaaggggttctgatccagaccccaagagaggattcttgtatctcttgcaagaaagaattcagggctattccatagagtaacgtggaagcaagtttattaagaaagtaaaagaataaaagaatgattacttcatagagcagccccgagggctgctggttgcccatttttatggttatttcttgatgacatgctaaagaaagggtgaattattcatgcctcccctttttagaccatatagtgtaacttcctgacgttgccatggcatttgtgaaccgtcatggtgctggtaggagtgtagcagtgaggattaccagaggtcactctcattgtcatcttggttttggtgggatttggctggcttcttttttttttttttccttttgagtcagagtctcactctgttgcccaggctggagtgcagtggtgcaatctcggctcactgcaacttccacctcgcggattcaagcgattctcctgcctcaacctcccaagtagctggggttacaggtgcctgccaccacgcccagctaatttttgtatttttagtagacagggtttcgccatgttggcaggctggtctcaaactcctgacctcaggtaatccgcccgcctcagcctcccaaagtgctgggattacaggcgtgagtcaccgagcccagccttggctggtttctttactgcaacctgttttatcagcaaggtctttatgacctgtatcttgtgctgaccgcctatatcatcctgtaacttagaatgccttagccctctgggaatgcagcccagcaggtctcagcctcattttacccagctcctattcaagacggagttgctctggctcaaatgcctctgtcattttgaaagtgtaatgggtaagaaagtgcgtgacggataaagtgtgagaaaaaataaacagggttaaacaagaggaacggagtcctcagggttggagaggagtgtggtttcatcagcacgggctggaaaggccttgctgggaagaaaattggcccacaaactaccctggcaccgcccccagctgcggattggctcaagccctcaagatccaattgggcacaaaggttggaggagggagttgcagttgcagttcctgattgactctggcagccgtgcatcagctcccaggggcacacgcctgtgggcacaatgcttctgcttcattgattggctgtagaaaaagctcatgcagcctctgattggctataaaataagcccatgcagcctctgattggctgcaacataagcccatgcagcctctcattggttgtaaaataagcacatgcagcctctgattggctgtgtaaagtaagcccatgcagccgctgattggctgcgggtggatgcactcacctaaggatgcgagctagcaggtcttgcagcggctatcacgcccctcacgccgctatctctgtgcagccgactgaggatccctagtcgcataaggctgtgcctggcctgttggcgtccctggcagttgttgggttctggcggttgttgggtccctggcagttgttggcggttgttgggttccttcattgaaactgcactaactgggcttccagtcagcgtcagtcagcggatccttgggccgtggggcagccgcaggtcggttaggccaccagggcggctctcgtgccagtgaggcccctgagagccctttggtcagacagaggctaaatctgaacagtcaggcggtgagattaagcatagtcagggagttcgccaggagccagcgttcctcagcctccaccacgtcagtcacctggtcagccagagggcagctggggcgacatccatctaccaagaaggtaagcaagcggcccgtgggttcacaatcaggtcagtgcccttatgagtcaacggttagtccctttgaaaatcagttcatgagaaaatccactcccttcagaacctgccctgttcattggttagttaggctcccgctaagtcggtctcttggtaagttacacccctgcaaggcacccagtcattactcacacagttatcccatgtgtgtctatcagtttcattgttagttatcctggctttccctagaaaatcgttttcctcaccataaataggtcagtcattagtaagtcagcccttcccttagaaagccgaacacctttgcatcactcacaccctgctaaggaaatacacagatggaagtgtgctgagaacagagaatatcctgagccctttggaacaagagacagaaggaaaattgagagacatgatggtgaaggaaaattgagagacatggtggtcaaggaaaataggctgggcgcagtggctcacgtctgtaatcccagcactttgggaggctgaggccggggatcacttgaggtcaggagttcaagaccagcctggccaacatggtgaaaccccgtctcttccaaaaatacaaaaattagatgggcatcgtggcccgtgcctgtagtcccagctactcgggaggctgaggcaggagaatcacttgaaccccgtaggcagaggttgcagtgagccaagatcgtgccactgcactccagcctgggcaacacagcgagactctgtctcaaaaaaaaaaaaagaaaagaaaagaaaaagaaaatataatgggtgcatgacgagtcatcacatgtatgctctaaaactgatggagagaagaaagaagaaatcagaattttgtacttaaatggatcattacatctccagcagtaaaacccactcatgttacacatgaggaaataagaagagggaaaatacttgaccacagttattcagtgctttactggcaaatcctggcccaggacctagacaaggctcattccgaccatctaacatgggcttttaaacagaagaaaggggaaggaaaaaaaaattgacaatgcaaaaagaaagtggatatgtggcgtgaatgagagaggcatttaacgacctggaaacttgggcgatatcttttttatgtgagaaggaaaaagggcaatcagtctggaggctaagggttgggagcacagaccactcagagaggtctgttaaaacatgccgaaatatggaataggaaaggacagggctggttccagaactctgggaagggattaggggtggtcaagagtggtcccaggctgagtgtgttggttcacggctgcaatcccagcactttgggaggctgaggtgagaagactgcttgagcccaggagttcgagaccagcctgggtaacatagtgagactctgtctctacaaaaaaaattttttcattagctggacctggtggcttgtgcttatagtcccagctactctggaggctgaggtgggaggatcacttgagcctggaaagtcgaggctgcagtgagccatgttcatgccactgcactccagaccctgtgttaaaaaaaaacaaaaaaaaagtggttccaagttaaatgctgataggagctaagcagggaacctaatacatagtaactaacattttttgattgcttaccaaatgtgaggttctgttctactgactcatttaatcttaacaacaactctaagatgggtgctattattatccatgtttttaaaatgagcaagtaggcctagagagaggtgaagctacttgcacactataaaacagctaaccttcatatctaggcagtttgacttgaatttaaaatttaaaaaaaagagagagagagaagctggttgtttgaattttttgtgaagtgctctgattattaaatgttatcccattttaaaagttagttttaaaaagtaagcatttgtaggccaaacaaaattcatttatgattgtttttagtctctgaagcaggctgacagtgagggaagtgacttacccagaatcacccaggaagtagcgacaaagattaggtcttctgacttctggtccacttccaggaaaaatctaagtatactgtgtgtcacatcagggctagctgatttattcttatattttattcatgaggaagtgaatttggagaggagaatgaacttcaccatgcttatacagcagtttttaaggcaaaatagaatcatgaaaaagacaccacagttgtagtcaaaggttgagtctgaaatctatgaacgtaacggctgcatgtcttggggccagtcatagtacttttgtggatctctgccttccttttggaagtgttgataatgagatgtacctcacagagttgttgagactaagataaaagataaaatttctacgtctctagagttgtaaatggcaaccatagtttctcattagatgttaaccaaaaaagtagttaacagtcatggcatgattcagtcattcccaattgattcacagcagggcacagtggctcatgcctgtaatcctagcactttgggaggctgaggcgggagaattgcttaagcccaggagttcaaaaccagcctgggcaatatagcaagactcgactctctctctacagaaaatattttttttaaatgaattgggtctagtagtgtgcccttaaagtcccagctactcgagagactgatgtgggaggactacttgagctcaggagttcgaggctgtagatagctgtgattgtaccactgcacaccagccagggtgacagggtgagactccatctctttaaaaaaaaaaaaaaaaggattgattcacagtatccaaatagtagaaacaacccaaatgccatcaactgatgaatggataaacaaaatgtggtctatccatacaatggaatattattcaacgataacaatgaaaggagtactgatatctggtacaacatgaattagccttgaaagcatgctaaatgaaagaagccagacacaaaagaccacatattatatcatttcatttatatacaatgtccagaataggcaaatttataattacggaaaatagattagtggttgcctacaactagggggtggagttggggtttggggaaacggggagtaaatgttaatagatattggtgtttttagggaggtgatgaaagtgctctggaattaggtaatggtgatgtctgcatatctttatgaatatactaaaactcctaaattgtgtgcactttaaaatggtgaatttatggtatatgaattatagctcaataaaaataaaaaaattaattataaaaaggttagctaccagtagacccatggctaaataaaaacctgaaaattttagggaaaactagatactcacatggaaattggacacttagtttataccaaatacaaaaataaactcaaaatgggttaaagacttaaatatagccaggcgcagtggctcacgcctgtaatcccagcactttgggaggccagggagggtggatcacttgatgccaggagtttgagaccagtctggccaacatggtgaaaccctgtctctactaaaaatacaaaagttagccaggcatggtggagcacgcctgtaatcccagctactcaggaggctgaggcacaagaatcgcttgcacccaggagatggaggttgcagtgagccaagatcatgccactgcactccagcctgggcaacagagtggggaccctgtctcaagaaaaaaaaaaaaaaagacttaaatataagaactgagattgtaaaactactaaaagaaaacatcggagaaaacttctgtatatttatatgtaatacacaataaaaattattggtttgggaaatagttatttggatatttctgcaaaaacacaggaaacaaaagcaaaaattgacatgcaagattgcagcaaagtagtttctgaacagcaaaggaaacaatcaacagagtgaagagacaacctacagaatgggagaaaatatttgcaaagcatccatctaataaggggctaatatccaaaatacataaggaactcaaacaactcaatagcaaaaaaatcaaataacccaattaaaaaatgggcaaggacctgaataggcatttcataaaagaagacataccaaaatggccaacaagtatataaaaaaaatgcctgacatcactaatcatcagagaaatgcaaattcaaaccacagatatcaccttatacctattagatgggtatatcaagaaggcaaaagatagcaagtgttgatgaggatgtggggaaaagtaaaccttgtacactgttggtggaaatgtaaattggtataaccactatggaaaatagtatagagtatcctttaaaaattaaaaatagaactaccatatgattcaggaatcccacttctaggcatgtatttgacagaaatgaactcagtatcttgaagagatatctgcactcctgtgttcattgcagcattattcaccatagcccacacgtggaatcaacgtaagtgtccattaatagatgagtaaagaaaatattatatatgtatacacacatgcacgcacacacacacacacaccccattcaaataatgtcattttgttcaacattgtctaatcataagagaaaaaaatcaattcccagccagtaccagtatctgtgtggagtttgcatgttcttatatatggtaaaattggtttcattttacatcatttcacttaaagcagcagtttccaagaactgaatgatgatgttaagtgaggatttattgtgcacacacacatacacacacagtggaagttattcagccttaaaaaaggacatcttgccatttgcagcaacgtaaataaacctgaaagacattatgctatgtgaaacaagtcagacacagaaagacaagtactgcatgatctcacttatatgtagaatctaagaaagtcaaacgcatggaagcaaagtatagaatggtggttgccagggctgagggctaagggaaatgagatattgatcaaggggcacaaagtttcagctaggcagaatgaataagttctggaggtttcatgtgcaccatggtgactatggtaaataacactgtactgtatacttgaaattttgtgacagtaaatattaagtgttctcaccaccaaaaaaatggtaactgtgaagtgctgattatgttaattcactggattgtggtaatcattccacagtgcatacatacatcaaaacgtcatgtcgtacaccttaagtatatacaatttttatttgtcagttatacctcaataaacctggaattaaaaaactgaaaattctataatctcatctctgatcactgctctaaccataggtaagcactggtatcaaattatacatcattctagatctttgttttactcattcatgtatgtatagttttgagtgtattatatatgaatatgtagatacatatttacatattatatatataaagcttttatataaatgacaaatgatccagttttcatttaaagattgtgaaatatttcagacatatagaaagatataaatatggtataatgagcatatacccaccaccagcttaatattgaaaacactggctgggcacggtagctcacacctgtaatcctagcactttaggaagcccaggtgggaggacggcttgagcctaggagttcaagaccagcctgggcaacataacaagatcccatctctacataaattaaaaaattagtcaggcatggtggcacatgcttgtagtcccagctacttgggaggctgaggtgggaagattgcttgagcctgggaggtcaagcctgcagtgaactgtgaatgctccgttgcactccatccagtctgggtgacagagcaagaaactgtctcaaaaaaaaaaaaaagaaaagaaaagaaagaaaacactacccctggtatactcccttccccaaacacatctcccactctcaaacatagagatcgctgctattctgaatttgacattttattctgtgtactaaggaacttaaccttgcctgaagagaagtctggcctttgcccttggcttctggaagacactccctagctcttagaatgtcacacctcataggggtgtctttgtttgcccagggaccttgcatcacactgaatattctagaaatgtgatttaggatgagggctggccacaccagataatgttaacaatgtgatttagagtggaagcaataccagatagtctaacaatgtgatttagaataggggctttggatcaaatggtatcagctcaacttcaggaggagctggatgctaagatccaccatgagggaagtcaccatgttacacgatggaggcccaataaaaacactggacacaaggcttgggtgagcttctttagttgacagtactatgcatattgtcacacattatcaccaggaaagctaagttatgctgtccatgactccacagggagaggataactagaagctttgtgtggggaacttctggcctctgccctgtatgtcttcccttggctgattttaatctctatcctttagttgtagtaaacagtaatcacgagtataacagctttcagtgaattctgtgagtacttctagtgaattaccaaacctaagggtagttttggggttccaaaaccttgcaaatgatttgagaaatgagggtaatcagggatccttgatatcttcagttggtgtcagaaatgaggggatcttgtggaccattccctaacttttcagttgtatcagaaatgggattcactagaacagccctgactcactgaaacatatggtttgaaaagaggaaggatgtgaagtcaagatgataagcctttgattcctgggctgtcctgcggtcacctgtgcgtatagaaatgcagctgttctgcaaacagttacaggaggtaaaagttaccattgctttttcaatacaatggatccaacccccaaggagctgacccactggatgcataaggaaacaaactaaataggcagtcccttggctatttttatctgtaatcgttaaaatgaaagtggctgaggcggatcctgatgctggcccaatcttgggctctggccagcctgagctacagctgctagcctcagggctgtggctaaagggaaaagttaggctgaaatgacagatggcaaagaaaattagagtggttcaccagagagtgagaaaagacgaacatttccaagagggtggaaatctttataaacagttattaagaaatgagatgagttaagtggacattgagggagtctaaacaaaggtctcagtggagcactcttagaaattaggtggagcagtgagaacctagacttgccctccagtgttgaaggtcccccatcaagtctgctatatttaccctagtttggaggaattttagaagccagaaggcaaacatgacaatgggaaatctgacctcagatctcctgaggggacgaacatgtgatctaatcaagataaatgacaaaagggcctgggttgcttggcctgacccctaactgaagacccaaagtcatatgcatattagtagtaaaatagtcaggggatggataagagatatttctgggactcatgtgggagtcttatacctgcattccaaaaggttggtgaaattctaatagcatctatggttagattgcgaagacataggattacaaagtggatgagattcaggcgaaactttggatgaaaattggaatgtttggacagactatgtaaatatgttatgtgaatgtatttacctaaatgtattatgaggaaagatattgtgtccaactatggaagagttcccctacgtactattatgaaacagaaggcatgtaaatcttcccttcaaccaatattgattgaatatgctaaataggaaccaataagattgcccaagcccacactaattgttaatttgaaacagtacaggatatctggtggacaaaacatgttagaagcttaacgtttgctttatttaggcagactggagctaaggccagtgagcaccacccagtggtgaatgctgggatttggggccagaaaatttccaatggagagacaactagctgcctattgggctttgagtctgccccatcattgaaggatataataatcctgacacctgaaatcctcatgatgtgtttgtcatgttggaaaaacactgtagtaaggaaggccatgcccaaaagagtctcgtaataaaatggaaattgtttatacaggaacatgctaccagggaaatgcaaggaggtcctcgttatatttatgaacaggtggctttttccctactgaagagctgcgagatcctattattacttgaatgatgtctattaatagctcttgattgaccaactaagagcggtttgatttatggatggcaattccaaagtgaattaataacatcctgtttggaagactggcactcatactgaggaaggcaaaaacaagtcacttcagtgggctgaactgcctccacatttgggtttttaccaattcatgggcagtggccaatggcctggccatatggtcaggcagatgggcaatgggaaactgtactattaaaaggatgcctatatagggtacagccttatggaattcactatagccagtatctcaaaagacctgttcataccccctacaaatgataaaataaacagagaaacagacctcttcctcccaaaaaggcaattaatatcctaccttttatgctggacatttcttggcaacttttaaaggatttttactacttgtgtgtgcgttcttaaacacttgattttgcccggtttttttcaaattttaaagaaatgctcatacattattacttatttgtgtctggctttgttcattcaatattttatttgtaagaatggtccatgttgttgcatctagcattagctcataggtttttgttgctgtgtagtatctcattttttaaaattctctgtttactggcatttggattgtttacctttttagctatttttaaataataccactgtaaacatttttgcattcctttgtggcgtacatatgcacaaacatttctataaagtatacatctgggagtggaattgagggtcatagagtatgtgtatcttctgctttgataaataactttgttgccctgatttatatttccaccaatagtgtgtgaaagttgagtaccacattctcaccaagacttgatatattgtcttggatatgtactggtatctgatggttttaacaggcattttgctggttattaatgagattttaaatattttcatggaaattttattaagatttgtcttatgatccagctgtggccaatttctgtaaacgttctctgtgtgcttacaaagaaattgtattctgcagttattgattgcagtattctctatatatttttggtcaaatttgctgatcaagttgttgaaatctttatatattccaatagtctgtttgttctgtcagtttctgagagaacagtgattaaaatgtcacactactattgtggatgtctgtttctccttttatttttgtagattttttgctttatatatttttggactatgttagtaggcaaacacaaattttaaatatatactttattcctgttaatgtcagcttatcattaggagatatgccattctatctttggtaatgccttttgcttaaagtctgctttatgggatgttaatgtaggtatgtctacattacctggctttctggttggtatttgcttggtgtatgttttcattctttggttttttctttttttctttttttgagacggagtcttgctctgtcgcccaggctggagtgcagtggcatgatctcggctcactgcaagctctgcctcccaggttcatgccattctcctgcctcggcctcctgagtagctgggattacaggggcccgccaccacacccagctaattttttgtatttttagtagagacggggtttcaccgtgttagccaggatggtctggatctcctgacctcgtgatccgcccgtctcggcctcccaaagtgctgggattacaggcatgagccaccgctcccggcccatttggttttttaactgtcctttacacttatgctttggttgtgtcttttgtaaacagcatggagtttggctttgcttcttttttccaatatgatgatcttagattcataactggataatttaagccatttatatttagttaaatcactgatgtattggagtttaaatctaacatctaggtacatgatttctacttgtcccaaccgttctattctcttttgtatcccttctgtttgtttctctgtctttattttcaaacaagcttttaaatcaaagtacaattttatacagagaagtattaatacagatagtaagtatacaactcaaattatcacaaagggagcagaccagtgtaaccaccactgaggtcaagaaatagaacattaacaacaccccaaacactccactcatgtactacaccattcattaccccctttatccttgctatgttctggatgcaagcacgttgtatgtgttgcaagtatgttctccagccctgcaacttgcatttgtcctccttaatggtatcttttgatgcagaaattaattctgatacagtccattttatccatatttcctcatagctagtgctttttggcccttttaaagaaatatttccttacctaaaacttaccaagatactctcctatgttgtattaaagaattccactgaccaatgtggtagctactaactacatatggctattgagcccttatattatggctagtctgaattgaagtgtgctgtaagtgtaaaatatatacaagattttgaagagtgtataaagaatgtaccaaatcttaacaattttgtgttgattgcatgttgaaatattgggttaggttcaatatgaataacctagtgaataacctaggtttctttcactaggttaaatgaaacatcattaaaattaattttacccatttcttcctttttaatgtggctgctagaaaatttaaaattatacatgtagtccacatttataggtcacattatatttcttcacacagcactgttctagaaaaaaagtctaaggactttcccaatgtccctagaagttatttttatgtatgacatgaggtaggggtcttatttccttttgctgtatggctgtccagttattctgacacaatttattcaaaagagagtcctttaacttctatgcagtgccatatttatcctaaaccaagtgatcacatatgtataggtatttttctaaccatatagcctgtcccattggtatttttatttatccttgtgtcaataccatactctatgaattactatgtatgtatgtatgtattttatttatttacttatttattttgagataaagtcttactctgtagcccaaagctacagtgcagtggcgtgatcacggctgactgcagccttgacctccctacctcaggtgatcctcccaccttaacctttcaagtagctgggactacaggtgcgtaccaccacacccagataatttttgtattttttgtagaaacggggttttaccatgttgcccacgctggaattactatggatttttaagtcatgatatccagtaggaattggaattgatcatttttttgagacagggtctcgtgctgtctcttttttaatagaaatttactgagaacaaatttattaaataaatgtctacatgggatataaaagggaacattgtgccatgctatacaatgttacttacaccattcatttcaaattttatggcaaaacaattatactgtggtagggagatgttgttttacacttctcaccaaactaaacattatcatatttttcctgagagaatgtcaacactttgctatcttaagtgatcacaccactgcaatccagactgggtgacagagagagagaaagaccctgtctcaaaaacaaaaacaaaccgggcatagtggcttatgcctgtaatctcagctgtttgggaggccaaggcgggtcaggtgtttgagaccagcctggccaacatggtgaaacctcatctctactaaaactacaaaaattatttggccatggtggtgaatacctgtaattccagctactcgggaggctaaggcagaagagtcgcttgaacatgggagatggagattgcagtgagccgagatcgagccactgcactccagcctgggcgacagagtaagattccatctcaaaaaacaaaaataaaacaaagaataaagcagacatgacactgaggcttcacagacaatcttagttgcctccctgtccgtacgtgctcatgagcctctcatcccatataattcctgcttctccaggtgaacaggccttcacgatgaccagagacagaagcccctgacttggctaaagatacttctgctctccccatccccacatcctctttcagttacgcatcacctcactccttctgaaccatatggttctgatgtcagagccagtgtagtaaagagcttctgctgttcctgagaactgttgctgctggaagtgatgcttccactgctacagctgggtaagtaaggtgagaagcagcactggaggtgtgtttggaagccaagactccagggcctgggtgttggcagggcagaggatgggctatggaggcatggagaaagaggacatatgggcataagtaccaaataatcaacatgaattagacagcttctgtgtgtcagattttgacagggctggtgtgtctgaagcaaatagcaaattgggcaagggagagggatggagagtgtaggtgctatgaaggcatgagagcactaggagctgtttcagacattactggaagccctgaagttaagtttttcagtgtttctgtgggcacactttgccaggtggaaaagacaattcagaggacagccatagaggggtccgtacatgagagtcccccgcagattcctcaacagcgccccgcaagtgactcaggtgaagagaccgagatcaggagctactggttaggggaaaattacccctttcttccagtaacctcaaaaaacttcaacgaaaaagtgtgtgtcaacactgaagacagattcctcattattagagaccttgatgaatgtgactgttccctcctaatccatgatattcatcaaatggccaccatgtcctacctgttctaaatagagcgaggcaatttccagcattcttacacagaagatgccatagtacatttggcttccagtgaatgttccaccaaagaccacttgagaccgggaagaaggaaattaagaaaggtgttctgtttattgaatgggtaatacttcactacgcactgagctgggtgcactgcaaatcttggggcattcattcttataacgatgataatatgagataggttcagcaaatatcccgattttccaggctaggaaacagcaatgataaggggagtgacttgcccagcagcacccagacaggaagtgatggagggagaattggtcatagagcctaagaggaacattgcaggtgggaagaagagaagcagagtaggaggtctggcttggacttctagccttgcagggtaggtgagggatcacagacaatgtagagcctcaggaaatttacttgccacccctcaagaaggtctagcgatcaggttcaggccagatgaggacagaagatagaggggaactggtctgggaggcctgaatcctgtgggcttccagaaagtccttctgaagctccttgtgaatagcaagtaaagagaaggctgcatgctggagaaactggaagagggaagccaggatgccttgctgactcctgacccttcctccccacagtacctgctaagctgctcaactcctcttgctccttggagaagacactgcagtgcagctgttccttccatgggattcccacaccctctgtgcagtggtggatgggaggagtccccgtgggtgtggatggcatggatggcagcctccaagtgacttccaccatgcttggcccctgggctaacagcaccatcagcctaactgaagagccagaaatgggcatgagacttctctgtgaggggaagaaccaaaacggaacccatgctttgagcatcctactgatgtcaagtgagggtggagggggctcggtgactgggtgaggacaataagcgggatggggacagtcactggggctagagaatggagcagagttttggctccgatgccaaacttctcacatgctctctgcttccaggaaagagttctttggctgcccaggccttcgtgaaagggctgatccagggtgctatctatgcgggaattgtaattgcgctgctcttcctctgcctcctccctctcatgtgagtactagggttaatattcacccgcaagcctactaccgggcaggccctggctgcagccctggcacagagagagcaaagacaggacccctcccctcaaggagcttagggtctaaagagggaaagatgtaccaaacatggtcaccacaatccagggccatgaggactatacagaaccgtaaaactgtgtcataaaacagacactttgaacacattttataaaggagaagaccaagaagggacttggcagccctggaaaaggcagcagcgagtccccggggtgctgtctgtggtgggcctgcaagggttcagtactcgttagcttggtggaaagtattaatagtacaggttgagtatctaatccaaaaatccaaaatccgaaatgctccaaagtccaaaagttctcgaggcaccgacataatgccacaagtagaaaattccacacctgacctcatgtgatagttcaatgcacacaaactttatttcatgcacaaaataattttaaatattatataaaattaccttcaggccatgtgtataaggtatatatgaaacataaatgaattttgtttttatacttggctcctatccccaagatatgtcattatgtataaacaaatattccaaaatctaaaaaaaaaaaaaaaaattgaaatctgaaacacttctggccccaggcatttcagataagggatatctaacctttgtatgcagacgcccagaggcatgtttgaggcatttccagtgtctttgtataatgtcaggtgcattgagagtaccaggtaatggctaaaaatgaggttgaaagacatccttggtgttggttcacagggtgttaaaacttagctgcatgtattagctagaagcatggagtgggaaggggtgagttgcaggaagtcaggccagagagacgggcaggggagcctgtccagacagcttggactgaatcctcatttcggagccatggaagagtgctaagctgtgaaggaaagcttgagcttggggtgggacacagattagagagagtgagagccagaaggtcagaggccaggcaggaagctggtgcaggggactaagcaggaaatagaaggcctgacctggggcaagtgatgaggggcagccagagaggtgggacttgggcatggctggctatggggagacaaagatgaggagtgaggtgtcagggcaaactgaggagctattttcaaagtataatcaacaggacttgaagaccagtaacaatctctctgccagttgcaaggccctttcttagctgacctcatctgagccccacagcctaataagcagggtatcccccttattcagagtgtgaaactaattcccagagaggatgtgtggcttgccctaggtcatacagcaagctggtactgttgttgaggctctaaatcagaagttctggtcaagatagagcccatttggggattcagggagatggagagccagaaccaatccaaggcttatttccttagagtgaaacatatcagaaagaagcaggcgaagaaagctgcagcgatcagagcaaaaaagagctctaaagtcagagcaagccaagaacttgagatgtctctgaagcctgaggaaccaggaaaacccgtagtcgccacattttctgagagccggatattggtatgtacctattgtgtctggaatctagtctatcggaatactgataataagacccacagggaaaggagcacacagtgttttgaaggtgttatcatcctcagtcttgcaggatacctaatgctagagtgtgctttcaggtcattttataaataggaagctaaggcccagagaggagaaggatgaaagttaagagaaacaatttaaagaacaattaaaatcaatttacacgcacacaccattacattgaatccccactgaaaaggcagttggggaaaatcctaatagcagttgtagcatcagagtggaaaccaaggatttggcctctgagtgtatggccggcagcagtcagcttggtgtagatgccacaggccaagtcagcctgaagtggttagagattaggccaagcccaggttactccttcattcaccctgtaccccacatcttcagcagggcttggaagatacagtgtccgaggttgctatgcctcactgttatttaccgtttatgattctccagaatcagaattatcctgctgccctcctaacaccctgcatgaacagttggtgtccttttgtagataagccatctgttaaattccaccaatatttcctgcaatatctcctaatctttgtgctcgacaatgctggggtctcagaaatgggccaaacctaggccttgtcctcagagagcaactagactggtcgagaaggcaccttcacagtaggggatgctgagccaggagttacggtggtgcagaagagggagggaccaaacctacctgaggaagtcaggcaagattccctgaggagtctaaggaacagtcagtgttatgggtactgaagatgcacagagaggaccagatggagaagaccgagttgcaggctttaaccatggggttgtgaggaagggctaagccagtgctcactccatgttgccttaattctgtgcacaagggggtgtctttttaagatttggatacctcacctctagacctgttccaacattcttttttctttgttctattttgcacctcgctttcaggaaaagcaagataaacgagccagctaagcctgtggaacatgcctcatacctggagtcgccattatccctggaattacaaagatctgcaaaatttatagcgctcacagaaaccctggaggctgtaataaacctggagccccctggactctcctcagctcacaaaaccctctcaattcctacacatcccttaacactcattctccattgaataggtggttactcttagacctagtcttagaacctctgaagacacactttgtaatttgttgtttggctaaatgagaagaaatctgtgccaccctgggaaggtgtcaaaagaaggaaaaatacatgtgacaatatgaatcaagtccatcagcaagttacttttgagcgcctactgtgtgtcagtgcctgagatacacctacaagagcgccaggctttcaagccttcatatctggatagaatcccaacttcagtgcttggtggctgtctatctttggacaagatctttcattccccatcctttgaacatcacatgacccatatctgggtggagaatgggtgaaaagtactgttcagagatgcaggtgagaaaaaacatgacgatgggccctgaatgccaagattcattggagctttggagctttatcttgtaggaccttatcctgactcccttagaatgtaagttccaagagaacagggactttgtctgccttgttttctacttttatcaccagcacccagaatgatgcctaaaatacaataagatctcaagaatgtttgtcaaatgatttaattaattataagctgttttaaggtttgaagcaagcaagtagagtgaccagatatagacagaaaaatcatttccgtaccctgaccccacatatgatatatttagaatgggtaaggctggaggtaaagatgctagttaggaggttatcgcaatagttcttggccagattgaaaggcaggcatgcaaggaatgggaaagggattctggcattagaatgaaccacaactatgtattgttcctctcagaatggatgacaacctcctttctagccagatgctagtagattttttttttttttgagatggagttttgctcttgttgcccaagctggagtacaatggtgcaatctcggctcactgcaacctctgcctcccgggttcaagtgattctcctgcctcagcctcccgagtagctgggattacaggcacacaccatcacacccagctaattttttatagttttagtagagacagggtttcaccatgttggccaggctggtctcaaactcctgacctcaggtgatccacctaccccggccgcccaaagtactgggattacaggagtgagccaccgtgcctggccagatgctagtagttttcagtaggtggaaagagggtcatctcttccctggggcaatatttgtgggtaaatacagtgatcctgtagcaccagctagatggtcatcttatactcagggtggacgtttacgttagcccccacatgtataagcacctctcacaggcagttcacatttcacagaaatatcagatgtgccaccatgtgccagataatgaggggaagaagtaagacactcaccctgcctccgtggagtcatggtctacatagacagacgatgaagaaatgcagacgaatttatagcttaaaatgttgataagtgctagaaagaaaacaggacagaatactatgagaaagcacaggaaaggaagctaggttggattacagagtcagagaaggcctctcagagaaagtgacacttgccttgagacctataggattattaggagctggctagacagagggagcagtagatcctaagctctgacatgagaacagtttggtgagttcaggagcccagagcaggccgctgtgactggaattgactgagggatgagctcctgaagggccagaacttgcaggccttccagggctctagtgggaagtttaggttttgtcctcacttatggagggttatttcctcttatgctttgtaattctggaaagtgcagattgtttgagaatcacatccagtggagctgtgtgagaatcctgggcagcagaggttttgagttgaggatagaagcctctatgtaacaggtttggtgtttgcttctactaaagatacatcctctgtttgggagggagaggcagacaaggctggggagagggagagtgccagtgttgggaaagaagagaaaaaaatgtagaaaaggaataggagagaggatagggatcgggttggagataggtcagagatgggtttgggaatgggaatagagaggctgggcttcatcgtgtgtcttgttttctcggtgataggggcctcgcgtgcaggacaggaaacaatgagtacacagggtgccttctgaccagccctggggtccagcactagtcattttgtgccttagttaatgccttgacttcccgcacataccaggttgagagaggaacgtcccttagcaactgattggcctggagtctagaggactggtgggggtctggaaccagctgcccaaggaaaacgattctcccaatgtccgggggacgcagtagcaactgttgcttctgactagctcaggctctggagacccgcgcgctctcttatgcggctgcgcatcccagcagctcccgcgagaagggtcaggccctgattggctctggacaaacccgcgcgagcttgcggggcggggcttcaagggattggtatccccgtgcaaggaggttggcgaggcctcaggggactcccagttcagcgaatccgttagccttcctctgccttagtcacttccccgtgaggcactccgtgtttgtgtacacggttattccacgtgtcagtcagttcatcgggcgcatccggagtcattgaaaacagtaataggaagtcaaacaaacccgcttgatgcaaaaattcaggaggacattcggtttttaaggaaatagtgctgaggaaggaccaggctggagctccttggaccctgagactgggaggtaaatatggaaaaagaagtgataatttagggggagggaaaagagatcacctgtgaagaaaactcacgcacacaccagggcctggagaaggaagtgagactggaaagagatcagaattttatttttatttcattattttattcatctatttaatttgagacagtgtcttgctctgtcacccaggctggagttcagtggcacaatctcagctcactgcagcctcgacctcccaggctcaagcagtcctcccacctcagcttccagagtagctgcacccacaatgccgggctaattttttaaattgttttgtagagacagggtgtcgctgtgttgcccaggctggtctcaaacttctgggctcaagcgatcctcccacctcagcctcccaaagtgctgggattacagatgtgagagatcagagtttttgaatctgaaggacccttacatagtctgcagtaaccctcccattctaccgaggaggaaaaagagggggaagcagaaaggggacagaacttgcccagagctatccaacgagttactggcaaagccccagttggaaccagcccagagctcttcccaacctttgattcgaggttgtaaattaaaggaggaggaggaaggattttgatagtgaaaaaaaagcaaaagtgggttatgatgcagagataggatttgttatctggaagcctgagtagcatcttgatgtaaggagggagtcgtttttttaagagaggcagcgatcagaatggaaaagcagagggctggttcttgaatcaaaacatcactgagaaaagagatgagtcaagagcggtcacaaattaaatgctgagggaaccaggcaggtgatgtgaatgataaacagttgcctagcacttattttgtgctggcctctgttctgagggttttacatgcattcattcatttaatcatttaatgctcccaacaattctgtcagatgaatcctgttaaaatctacatgttataagtgaggaaacgggaaacccagagaggggaagtaatttgcccacagtcacacagctggcaaatggtggcgccagacttaaactcaggcaggctgactcagcacacggtcttaaccactgtgttatatgcccctcccaggtgagtgcagcagggagagcaggggcagcaatggactggagaacaattgtccaatattaaaggggaaagttaatatctgccatgtgttgtcagatctaatttattaaaaagtagctgggagttcagacttttatgtgaggatcctgatttttaaacattgcaactaatgaaagaaagtctgtatgcagttttcttaatgcaggctaaataaaaccccctgcattttaactacctcacaaagccactaatttgcaaactctagactatcttaaatgaggaagcagttccctagtgagggaagggcctggcccagaaaaacctagaaaatgggaggcaaagaccaagcctttggactgctggccgtccactcacagaagaatctagaacccttcctttgaactggcttcacatccaagttgtatgggtttcctgttgctttcataagaattaccacaacttggccgggcgcggtggctcacgcctgtaatcccagcactttgggaggccgaggcgggcggatcacgaggtcaggagatcgagaccatcccggctaaaaacggtgaaaccccgtctctactaaaaatacaaaaaattagccgggcgtagtggcgggcgcctgtagtcccagctacttgggaggctgaggcaggagaatggcgtgaacccgggaggcggagcttgcagtgagccgagatcccgccactgcactccagcctgggcgacagagcgagactccgtctcaaaaaaaaaaaaaagaattaccacaactttagcagcttttttgttgtttgttttgagaccaagtctcactgtgtcacccagactggagtgcagtggtgcaatctcggctcgctgcaacctctgtctcctgggttcaagctattctcattcctcagcctcccaagtaccaccacacctggataattttctaaaaatatttttagtagagacagggttttgccatgttgcccaggctggcctggaactcctggcctcatgtgatccacctgccttggccttccaaagtgctgggattataggcatgagccactgggcccagcccaattttagcagcttttaaagtaacactcatgtatgatctcacagaaggtcaaaagttctggtgtggcgtggttcccctggttttctgctccagctttcacaaggcctgaatcacagtgttggcagggctatgttgctttctcgagtccctttggatgaacccatttccaaacacattcagaatcagttccatgctttgtagtagtgaggtctgcattcccttgctagctgtctgctggggtcattgtcagcttctaggagctgccctcatgggctcgtgggttcgttccttcatcttcaaagcaaacaatggtgagtcaaatccttcgtatgcttcacatctctctgacctccacttctggctcatgtatgccctttctttctcctgaatctctctgacttttctgctttgcaagtttcacgtgattacattacattcactcagatagtgcaggatgatctcctcaatttaagatcagcagattagtcaccttcactctatcagcaaagtcccttcactcagtcagcaaagtcccttcactgaagcacgtagattaatgtttaattgaataaccagggcacaggaatcttggaatgggagacatctttagaattttgcctaccacacaagtcgagggggaagacatttgtaactcatatggtgcaaaactatatgcttttcccactgtctttctcaaaccttgtgaggtggacaggacagtttgatttattcccatattttatacatgaagcatgggactcagagaggagaagaggcttcaaccgtgatgacacagcagttctgaaggcagcctggcataccggaaagaacactgggttcggagtccagggacctacattatgacttcaggatgtccatttcttggccctgtgaacctgactagttcctatgctgttctgggcctcagtttccttatctgcgaagtgatgcattgagaactacatcacagtgctgttgtgagattgagaatgataaagtatgtgaatctccagtgcacagcacatgggccaccatgattgttcggtattatttatttatttattttaaggtatctgcagagccacagctagaacccagatttatttatttatttatttatctctctctctttctctccctttctctctctctctctctgtctgtctcccaggctggaatgcagtggcacaatctctgctcactgcagcctctgcctcctgggttcaagtgattctcataactcagcctcctgagcagttgggactacaggcgcatgccaccacgcctggctaatttttgctttttaagtagagaagggattttgccatgttggctaggctggtctcgaactcctggcctcaagtgagctgcccgccttggcctcccaaagtgctgggattacaggtgtgagtccccgcgccttgccaaaaccccaaatttcttggttccaaatcttctttcatttgataaagctttattatgcaccagctgtgttccagattgtgtgttgggtactagagacacaaaagtgactcagacttgactttgaaaggtggactccattatgtcacataaaggtaccttgggcatgacacacaaaggccacccagaagtggtacacaaaggtgattccaacatgacacacaaaagatatttggacatgactaattttctcaaggaactcacattctggtcagaatagatacagagttacttccctgcgtactgtgaaggggcagaagctgaccaaggagagaaagagaaacagaggggaagtagggttaggtagtatttctagcagtctgccaaaatctgtcaaattttggagtttattttgacagtaaagtgaagccaacagatggtaacgaacagggaactgacatgattgatttataatttaaaaggatgccatgcagatgtggaaatgtgaaggggcaatggtggaaatatcactggaacaatggagtaatggaaattccactgtccttcctcagctgcagagccccctgcagagtctccttgtcatcttcctccaaaagttttctaggagtccccaaggagtctcctatgtcttcacaaacaggccccattcatctggtacctgcaagcatggaagctttactttttttttatggtggggatggagtcttgctctgtcacccaggctggagcgcagtggcgcgatcttggctcactgcaacctctgcctccccagttcaagcaattctcccacctcagcctcccgagtaactgggactacaggcatgtgccatcacacctggctaatttttgtacttttagtagagatggggtttctccatgttgcccaggctggcctcaaactcctaggctccagcaatctgcccgtctcggcctcccaaaatgctgggattccaggcgtgagccaccacgcctggcctaggagttcacttttggctagattccctggtaaggcattttatcagtttcccaactagcgtgacaatcaaatggagaagagatatggcagtgggctgtgtggggttgttacaatagctccacagggtcatcagaaaaccaggctccccatgttgttgtcagtgacatccccagatctctagctttcattctcacagttgtctcatagtcgccaggtggctgcaccatctccagcatcacgttcatcttccaggaagtaagaagaggaaggtgaggaggaggaaatgatggtgctagtgtcagaaaagcagaactcccaaaactctccagcagatagcctcttaagtttggtatttttaagtagacaagtctctcaaaatgtgcgctcagtaatctagtggagttaaagatttcttttatttatttatttatttatttatttatttatttatttatttatttttgagatggagtttcactcttgttgcccaggctggagtgcaatggtgcaatctcagctcactgcaacctccgcctcccgggttcaagcgattcttctgcctcagcctccccagtagctgggattacaggcgcgcctgccactacaccctctatatatatatttgtatttttagtagagacggggtttcaccaggctgatctcaaactcctgacctcaggtgatccacctgcctcagccttccaaagtgctgggattacgggcatgagccaccacgcctggccaggtttttatttttatttttttgcattgttcatgagaaagaagagtacggtcctacagattggtatacaatttaggaaaacagagatgtcaattacaatgttattattaccagagcaagaaatcatcaaataagacaacccgtcagaattccattttatttggggatcattttcataagacatggaataatttctaacatctttgtagtctcataagaccatttggtttaaattattcttccaagagcagattcgtattaccaaagactagaacaagtcagcaaccgtcatgaatattcatacaaaactgtatattgcagaggagaacataaatgatattcttataaacagtctcagttttgcacaacatcaaatcaaattccttgaaccattttataacacagaacaatatcttttgatttattgctgcaggggcaggaaacgtgtccttcaactctttctgagagtcatgtactttattatgaaaatttatgtttttaaaaccaagtcctggaattttattagctagtattacatgaaaaaaaaaaaaaacccttgggagctcagttgggatggcaaaaaaaaaagggagaaaagctgaataggcttttattcactgatagtaatttgataacatttttcttctccttggctcactggccagaactctgccatatggccaccctagatgaaaatgaaacaagaaaatagagattttatttttcagattggtggcttgatcacctggacaaatttgaaataacaaggaggaaacagaggttgaatatcaggtaggcaactctcagggtctacctgagatattgccctagaggagatggatagctagggctgctgaagacagtctgagagaggaggcttctttctggttgtgagatccaggagagaacttccaggaggaggttacatttgacctggacttggagagagaaggagggtttgaatgtgggcaaaggacagagctgcagaaggacgccatgacacggggagtggcctgagtaaacaggcggaggaaggatgtgcggagcatctgtagaaaggatccccatttcagccggtgcattggctcccgcctgtaatcccagcactttgggaggccaaggtgggcagatcacccaaggttaggagtttgagaccagcctggccaccatggcgaaaccctgtctctaccaaaaatacaaaaattagctgggcgtgctggcaggcacctttagccccagctactcaggaggctgaggcaggagaattgcttgaacccgggaggcagaggttgcggtgagctgagatcgcgccactgcactccagcctgggtgacagagcaagactctgtctcaaaaaagaaagaatgacagggtgcaggcatgggggctatcgaggtaagggaaaagcggggcaaaatcagggagagctcgaatgaaaggcaagggagtttggaatgtatcctatcagccgctgaaatattgtttatttctcaaatatctctcttaaatatatcaccttctctttgtcccccatagctattgttgcagctcagacttcatcctctttctcctggactgttgcttcctcctcactgcagacccagaggaacctttcgaacacccaaacccgttctcccatggttcaaaaccattccataatttccatgacttcccccattgacgtgggagggagtccgagctcctcagcttggcatttgaggctctttgaagaggtaatggagtgggaatgcagactagagacaggaaagcagacatggtgttgaggcttcacaaagagcgtgcggacaacccctgttcttttgtttctgaggcagggtctcgctctgttgcccaggctggagtacagtgttgtgaccacagctcactacagcctcaacctcccaggcacaagagatcctcccacctcagcttcctgagtagctggaactacaggcatgtaccattacacccgactaattttttttaacattttgtagggagagggtctccctacattgcccaggctggtctcaaactcttgggctcagcctctcaaaatgctgggattacaggtgtgagccactgcgcccagcccaaactctgttcttgaagctccccagcatctggtcccatcaggcccctaattcacaagattcgcagaccttaggggtggattgaaaagacaagagcccctagcaagcagtggacttctttctagcctcaccccatgcttcttactgctgcccctctcctcatccattccaaatcctgccctccaggacagaccaatctgaggtcagagttagcagcaggatacatcctggtcctctcttgcccctgagatctcgctggggctgatggcactgccactgctatggttgggtaagtagaaggagaggcagcatggaggtgtcttggggaggtaagggtgggtggagttggaaggcagacagggctgaggtaagatgaaggctgaggtaagatgaagtacctaaaaaattaggtacttggccaagcacagtggctcatgcctgtaatcccagcatgctgggaggccaagttgggcagatctcctgaggtcaggagttggataccagcctggccaacatggtgaaaccctgtctctactaaaagtagaaaaattagccaggtgtggtggtgggcacctgtaatcccagctactggggaggctgagttgggagaatcacttgaacccaggagtgggtgttgcagtgagccaagatcgtgccactgcacttcaccctgggtgacagcaagactctgtctaaaaaagaaaaaaaaagtagaatctttattctacaatatagatcctcaaaaaaccctcagtctttgaagaccagagttcaggttcaagctctaccaccttgagtaattctcttcagtttgctcacctagacaatggggtgttccccttctacagagcaaaaggaaatttatttgtggaaaccattcaaccacaacaatcctagctttcacaaggctgttggggaggggagggagttccaaatgagctaatgggtggtgagcacaattattcactaacggttcactatgacatggtctcttgtaatgtaatgtgactgaagtcaaaatctgcagttattacagagggccatgtgcctctgtagttatggtccttaattatcacaatactgtagcattggtattatcgtacccacttctctgattgagaaactgagattcagaaatgatacaacatgacccagatcacaagatacggttaataccaacaagaagagcaataaaaaatccagcagactagattggggtggtgcagtttaggagtccccccaagatgcctctgattcagtgatccacaagaaggactcaaaactcagcagaactgttttactcatgattgcagttgattatagcaaaagagtacagatgaaaatcagtacagggaagaggtgcatagggcagggtccaggagagagcaggcatgagctttcagctgacctctcccagtggtgttgcaccaatagagcttacttctttctgcaacaatgtgtggtgacatgcacagacatgccaagtagagaagtgcacccaagccttggtgtccagggtttttattgtgggtctggtcactgacttagcttagtcttcagcccctccagaggtcaagctgatgccccaggatccagggctcccaccataaatcatagtgttagcatcaactgatgaagtccaaggtcccaggtaaacaaagacactcttatcaggcaggatatcccaagggtttagagatcacctcataggagttggacaagtgtcaagcctttcttaggtaaggtgactcttttaatgcacagatataatacaggagtatgctaggtgggtctgtttttcaacttggatctctccttacagggctactttctcatgttttgatggaagtcaagaagataccagtggaagaggggctgtgcactacaatcccttgtgcatttgaatttcccaaagaacccccaagcaattccatgatcatgcactactggctcaacaaaaacatcagctccctggtagctacaaataaacccaatgctaccattggtgataacaccaaggacaaattttacatgactgggaatcttgatgaagaagactgtaccctactcatccacgatatactcaaagggaacagcataatatatttattctacgcagatctaggagaacaaaaaagtgctttcctgggggagaatatcaaactttttgtgtcaggtgatgttcaatatcatccgataagtggtttggaaagaaggaaatccaaaagtggttctggtgattatgtggtttttacctgatgggcactgggctttacaaaaccttaggtatttgagttttataatgatgcaatgagatcagtataataggtaactttacttttccaaatagaaatggcaaagagagaagcgattcaccctatatcatccaaccagtacaaaatagagaggaaatgatcacagattgggctgggaaggggcagagtctaagggagaactgggctggaaaagggagacagagtaggagctaccactagcacatgtagtctaggactcaggtaaggggtcagaatgtagaatcctcattctacaatgtagagcctcagaaaactactcaccctcagtctttgaagaccagagttcaggttcaagctctacaaccttgagtagttctcttcagttttatcacctggacgctgggctgttccccttccacacagagaaaggaaatctatttgtgaaaaaccattaaaccacaacaatcccaggtttcacaaggcggttggggaggtgagggggttgcaaatgagctaatgggtggggagcactttgtaacctggaaacgttgtgcatcagtgaagtgtccatgagggtcccttttcccccaaggtttgggtctacttctctcttctccagagctaacccaaaagccagagctccacatgccagagattcttttggctgagaagactgtgaccttgaactgtaccctcaaaggcacctgcaaagaaaccaaagccctcttccactcccggaagaacccagccatctccagcagctcctcctcggtgctgcacttcaccctgaggcctgaggaccatggcaacacccttggatgtcacttgaacttatccctagccaacgtgaccagaagtagcttggtcaagctccaagtggtctgtgagtgctggtgggcacaggcaggatcctgagaaatagtgggctcaagaaaagacctgagccccagagggagagaagtcttaggagctgtcacatcttccccctttgggaagacctttggggctgaaaggccagaggtaggagctgagcccaagtctgaggcagatgtggagagaggatgaaaggggactgttttgagtcccagccccactctgggttgccagaaagtctttctgaagctccctgtgaatagcaagtaaagagaaggctgggtcttaggggaagtagagaagcaaagtcaggacatcttgatgatccctgattcttcctctgcacagcacctgccaggttgttcaattcctcttgttccttggagaagacagttctgtgcagctgttccttccacgggatccccacgccctccgtgcagtggtggatgggaggtgtccctgtggctgtgaacagcatggataacatcctccgggtgacttcttccacatgtgccccctgggccaacagcaccatcagcctcattggggagccagaaagagtcatgagacttcactgtgaggggaagaaccaatatggaattcacacttccagcatcttcctgataccaactgagtatccagggacctagtgactgagctggaaagaacacctaaagaccagatgcagatgggcacagggccggaggaaagggtagagagttttagctcagactttaaagcctttggagaaaggtgaatctcacttccctccaattccagataagaaatcagtttccagtgtgttcgtgaaaggattaatccagggcattgtatatggagccattgcattctcattgctcttcttctgcctcatcctcttgtcgtgagtatcaaagttcaaattcatcagcagcctttcccaaagcctactacctttatttatgttctccttttccttcctcatactttcttccaatttattttgctttgtctattttttttttttttttttgagacagggtctccctctctcacccaggctggagtacagtgggtcaatcacagctcactgtagcctccacctccctgggctcatatgatcctcccacctcagcctcctcagtagctgggactacaggtgtgtgccaccacgcctggctaatttttgtattttttgtagaaataggatttcaccatgctgcccaggcaagtttccaactcctgggctcaagtgattgacccacctcagcctcccaaagtgctgttgggattactaggtgtggcccactgcccctggccttgtctaccttttaaaaatggattcttatatcgttaactttcagctactcttctttttcagtatttgtatttagggctataagtttccctctaagcatgactttagctgcatctcacaaattttaatataaatatttcattatcatttggttaacatatttctaatttccattatgattttttgactcatgagtattttttgtttgtttgttttttggtttggtttggtttggtttggtttggtttggtttggtttggtttggttttgagacagagttttgttcttgttgcccaggctggagtacaatggtgcgatctcagctcaccacaacctctgcctcccaggttcaagtgattctcctgcctcagccaactaagtagctgggattacaggcttgcgccagcgcacccagctaaattttttgtatttttagtagcggcggggtttctccatgttggtcaggctggtcttgacctcccaacctcaggtgatcgcctgcctcagcctcccaaagtgctgggattacaggcgtgagccaccgcccctggcctgacccatgagtttcttaggcacattactctctttttaaatttttagcttaaaccgaataaggtcagaaaatatactatgcatgatttcaattccttattttctttgtaacacattttttgtctcgtttttataaatattccatgtgaacttgaaaagaatgtatattttatgcctgtcaaatgcagtatatatatctctctgtgtgtgtgtctgtgtgtgtgtacacaatcacatacatatacatatataccctttaaatcaaattcattattcatgttgtttaaatcttctctacttggactgacttaattgcctgcctgctctaatgataagagatatgtgtttctaatctcccacaatgattgtggatttgtttgtttcttcttgaaattctgtcagtttttgctttctaaatcttgaggccatgtcattagcttcaagtctattttaaaatgtgcatacaaggccgagcatggtggctcacacctgtaatcccagcactttgggaggccaaggcaggtggatcacttgaggtcaggagtttgagaccagcctggccaacatggtgaaacctcgtctatactaaaaataaaaaattagccgggcatggtggcttgtgcctgtaatcccagctacttgggagattgaggcaggagaatggcttgaacccaggaagcggaggctgcagtgagccgagatcatgctgctgcactccagcctgggcaagagagtgagagactctgtcccccaaaaaaaaaaagtgcatacaagtatcttccttatatcagataccatttttcttcttcacctttgtattaaagcctattctgtcagatattagtatagctccaccagctccttcttttacatctactctcaatctgtgatctgaaggtttagttatgtgtttcataatcagcatatgattttgactttttttagtcttgtaatttttaaattggatttaaattaatttgcttgatgtaattactggtgcatttaaatactgatggtatttcaatataccatcctagtttgtcccatatgtttctttttttccctttacttgtcttcatttggattggctgggtatttttatcaatccattcttttctttctactagttgaaaattatgcaattatatgttttttaaatattcttttactggttacccagaaatcaccacatctatacttcagttatcaaagtatatatttgataatttcaaagtataaaacctttaccctcctccagataacataaagaccttagaacagttgaactctagttttcctcctcacaacttacatgctatttttataacatgctttgtggcattttatcaattccaatatacatgttatttcacattcgaacatctctgaaatagagatatgtcttcaaccgatggtgatttacagttgctgttggtctcaggtggcagtcctgataaagttgtcattgcctgcaggtgcctgaactcttgtcattgctgttcatattatcactgtaattgaattatttgttcattgatacatgtttaatttattgccttttcaaacatttgcaaaagtattacattattagctgccactgaaacaaagttatggtgtatacagaagggcacagaagtaaaagagtaagcataccttccattctgtgacacctgtaacatttgtttgagaaatgaccagaattccatattttttgtaaagcaacaatctggtgctttatagaacctaggaaagagagatacccacatgtggatgaagccatgttactttttcttgtaagataaaaagcaaaagggtaatttatctcataaactgtcaatgcaaatgaaaccagaaggaattgcttaatccttcggaagacatttttaaaatttaaattaacatgacattggatgattcatgtgctgttcaggactatgttagttcttaatagtttaactggcaacatttttttcccttagtgatatataaattatgcatcttactattaatggcattttattattaatgaaataccaattctatatttttgagcccccaaagacgtcatcatcatctttggttttatttcgtacattcactgctcattttgatttacatatatatttaccatagtctctattctttattccttacattctgttagtattctcagatcttccatccagaatcttttttcctgaaatatattctagaaagctgtttagaattggttttctggtagcaaacattcttggttttttctctcactttctctctctctctctctctctctctctacccgccccccgactctctctccctctcccttcatagttgaaagatattttggccagatgtggtggctcatgtctgtaatcccagcactttgggaggccaaggtgggtggatcacttgaggccagaagttttagaccagccaggccaacatggtgaaaccctgtctctactgaaaatacaaaaaacaaaaatagccagatttggtagtgtccacctgtaatcccagctactcgagaggctgaggcaggagaatcgcctgaaccctggaggcagaggctgcagtgagctgagattgtgccactgcactccagtctggaccacagagtgagactctgtctcaaaaaaaaaaaaaggtatatttgccaagtttggaatgctgcatcggcaggcattttctttcagtatcttgaactattccatgttccattatatcttgcttctattatcacaggagaaaagtcagccatgactctcatctgctgctcctttgaaaatgatctctccttatctgtctctgcctttaagacctctttgtctctgacatttccggtttggcctcacactttacactttcataacaccaacttgcctatttgtctgtgacacatgcgtttcttgtcctgcagctttgctgatatgtggcttctgcccaatactccccctcctctgcatttcattttctacccctgctcccctctcacacctggctgacatttactcatcatttaggactcaacctacagcccctccatcacatgctctggaaaacttccccgggcctctctccggggccaggtgtcttttcaggactcctgtaggtctcctggacttttgggtattagcactaacacttttactttgatgtgactgagtgtggatatcatttttttagatttgtctttatttatatttatttggcctcttcaatctatgctttggtgtctttcatcagttctggaaagattcttaaccactgtttatattgcctctgctctttgttttcatcatagggctctcatctaatgtttgtcaaacttttttatctgtttcccttcttaccctgtgtcctgtattttccagagagagggagtcaagtaaacaagtactaggttagaggtctgtatgagggagttgctaagagaaccctactctttcactgtctctccatccttggggcagaggtaggggatcagtattgcccagaaaatcctttagcttgcctctaatcaactccctccaacttcacactctgtcagtatgccaggtgtttccctctttcccccagtctcttatctcatcccgtcatgttcagcaataaggtttacctacttccaaggaaaaaatcagctccccaacacatacaacgttattaccattgacattgagtgatgtactccctgccttttttagggaaagaggctttcttcctcctgtccaaggtaagctccaccttctctgcttgggaatccttctcctccactgccttaggagctgtactccatcaatcatcccttctggctcctaaattttcaatcattctttctttgctggcacaaatctctcccgcctcagccccacaggcttcctctatgtactatccaatattctttcgagaaagtatcttacaccacttcctgattctcatcactcttccacttgctccccagcaccaggccactgacatgacattgtctaaagcaaccagttatccttattctcaatgttattctcaaaatccagtggcaggtgttctttctcttgttcacctttaggcagcatttaggattggggttggtggggtgaggatctcccacccagtggcttattttcatagcaaggaaagcatggcaaggctgtctgctgaaaatgacatgggtgggagcatggggaatccatggggaattgagaagaagtgtgatgtgttagggtggttggaatagccactggggagaatgagcaggatctgtataaggacaaggagagcaaccactgagcagtagccaaggcccattggttactggagattagtaatcgttaatggtggcaagcatcattgctatgtgacatctcctcccagcagcagtcattggaagacgtcttagtccattcagcctgctataacagaatacatagactgggtggcttataaacaaaagaaatttacttctcccagttctgaaggctgggaagttcaggatcaagtcaccagaagatttggtgtctggtgagggcctgcttcttggttcacagatggcaccttctggttgtgtcctcacatggtgtacagggaaagggagttatctgggctccctttataaaggcactacaatcccattcatgagggctacacactcccgacctaatcactccccaaaggccccagctccaaatactaaaacactggagattatgtttcagcagaagaattttggaggaacacaaatattcagactatagcagaaaaaaaggagtagatgatggcattggtctaggtttgagtattcatggacaagatgccaggaagggtgatggagtggggaggttggagacgggcaagcaaggaggctggaaggagaaagagagcgctttaactggggagccgttgtacctagtggggtggggagggaggaaaggaagagaaacagagagtcttcatagactctagaaaatatagtgtcttggaattgaagcttccacctgtgatatcatataatgggaacagttggaaggggagcaccaaaaaactggatggatagaagaactaggcagatcatgaggtattggaatttacattttcataagtggaaaagttttgggagataatgaacccttggtagttaaaggaaacagttgcattcatcaggtctcttccagttgtgagttataagggctgaattcaacaagctcaaagagaaagggaacagttctggtcatctgttgctatgtctctacccctgtcttagtccatctgggctactacaacacaatgccatagattgggtgttttgtgcgtaacagagatttatttctctcagttctggaagctaggaagtccaaggtcagggtgccagcaggttcagtgtctggtgagggctcttttccttatagatgacatcttctcactgtgtccccacttggtggaagggactggggtctcgctgaggtctcttttataaaggcttttgtctcattcaggagggttccatcctcatgaactaatcacctcccaaaggccccacctccaaatacgatcacttgagggttaggatttcaacatgtgaatttgagcggggggtgtaaacattcagatcatagcaatcccccaaaatacagtggcttcaaacaataatcattttagtatttttcatgatttcctagattaggaatttgggcagggcccagctgggtgattcttttgctccctgtggtgtcactggaggtcacttgagttgggctagcatggagaatccaaaatgctttcattcacaaaccaggcattttggtgtggatggccagaaggtgaggctcagctgggcccctctttctttccatgtgggctccgagtctctccatgtgctctcttccaaagcagaagctgccagtcctcttaaaggacaggcccagaatcaatagcacatcacttccacagcattctcttagagcaagtcacaggctggccaagattcaaaggaagaagaaatagattccacctgtccttaggaaaactatccaaggatttgccaccatttttaatctgctgtaggaacagattgactgttaagtctaaaggcacgtattagtttgcaggcgctgccataacaaaataccacagactaagtggcttaaacaacagaaatttgaggctgggcacggtggctcacgcctgtaatcccagcactttgggaggccgaggcaggctgatcatctgaggtcaggagtttgagaccagcctgaccaacatggagaaaccccatctctactaaaaatacaaaattagctgggtgtggtggcgcatgcctgtagtcccagctactcgggaggctgaagcaggagaatcacttgaacctgggaggcggaggttgcagtgagctgagatcatgccattgcactccagcctgggcaacaagggcaaaactccgtctcaaaaaacaaacaaacaaacaaaaacggaagtttgtcctcccagcattctggaggctgggagtccatgatcaaggtgtcagcagtgttggtttctcctgaggcctctctcctcactctcttactgcctcttctcatggtcatacctctgtgcacacacccctcggtctctccctcttcatgtaaggtgctatggtctgaatgtctgtatgcccctacccctgctaattcatttgttggaatcctaacccccaagatgatggtgtttggaggtggggccttgggaggtgattaggtcataaaggtggagtcctcatgaataggattagcgccctaatagaagagcccccagagagccatctcctccctttcaccacatgaggacccagctagaatttgctatccatgaaccaggaagcaagccttgcccagacgtcaaatataccagtgctgtgatcttgggctttacagcctctagaagtataagaaataaatttctgttgcttataagccacccagtctatggcaccttgtgatagcagcatggacagactaagaaataaggacaccagtcatataggattaaggccccacctgaacagccttcatttaacttgaggcgctatttccaaaaacagtcgcatagactatggcccacccataatgatctcatttaaccttaataaccccttaaaaggccctatctccaaacatggttacattctgagctactgggggttgagacttcaacatatatatttgtggggacacaattccacccgtgacaggcggatctacacttcaggcatgtctgaatccaggcatgcagatggcttcaccaagagtctgtctgtccccaccctatggctctgtttccttctggttaacgtgagctctggaggctctcttcaccttacaggcaagatggccagccccagattcacgtcctcctctcttagctaactccagctgacagagaacttgtcttctcgtggtgatttagcaatcccagggaagactgattggctctacctgagtcaagggtcgatgccacctctaacagcccatcccagctggctcccccaggaagggattccagccaccaccaacaaaaaggaactggcctcagaagctctgggagctgacatgtcggggtgacaattgggtctgtccatgggaatgtcaaaggcgcccaaaatgatgacagaaatctggggacagaaagactgagagtcaagcataaaaatcctctgggaatacagaggcctggcctagggggttgccagtgacagaaatgagaggaaggggatgttctggcccaatagccagaggctcaaagtagcagaaggagactctttcttcagaggatgagggttctaaaacagaagggtaacttcctgacgttgccatggcatctgtaacctgtcatggtgctggtgggggtgtagcagtgaggacgaccagaggtcactcttgtcgccatcttggttttggtgggttttggccagcttctttactgcaagctgttttatcagcaaggtctttatgacctgtattttgtgccgacctcctatctcatcctgtgacttagaatgccttcactgtccaggaatgcagcccagtaggtctcagccttattttacccagcccctgttcaagatggagttactctggttcaaatacctctgacaatatcgtagagcaaaccaggcctcagggaggtggacactgaacgaggacatatgcagatgtgtagggacaaatgttgggaagtgcctggaggaaaacggggagctgggagagagtgtggcaaggggacggggcggggagcagccttcaggtacttgctctgaggcctaaaggagtgtggggagctgcccagactgagggagccgcagttctaggctctgagattgcaaaggtttatcgagttcaagagcccagcagggccagatgagctcagagcttaaggagagcttgggagaggctaacctgctggcagagcctcaagggctctggtgagaagtttgggtttcatcttccctcgtggagggctattgcctctcatgcttggtcatcctggaaggtgagctgctctcagtggggactttacctgcaagaagcatatgcggacaatgtggtgggcaagtccccctgaaatgagttttgtgtgagttgcccaacagcgaaacacaccgggggctatttgtgttcattgctcactttgtcgctctctgatgcaaatctctataaatggaggcctcagcttctaagataaatacaaaaaggtttttttttgccaccgaaagcccaggccaaaatagacatgcttccttgtcattcccttgatcaatgactagattttttttctggcgccccccttgatgtgggggtgtcatatccaggttgctacctagtatggacccaaggccttgttgtctgctgtcactggaccatttaaagcaagtcccttggtaatcataacagcaagcccccgcttccccacaacccagcagtgtgcagccaaccctcagttgatgcgtggcctctgatcttcagtccccaacgtccttacgacctcagccccatcagtattttcggatgtttttgtagagcaagtgttttcagacaggaaatggacgtttgaatcttattgtctgaacgcagaaagaaacaatggaaggatctccatttggggaggaacaggtcgggtctttaaagcttgctcaggctgctctgcaggggacacgggacagaaggacacagccgccagccagggaccagcaggtggcccctgcagctgccagagcaagaaaggaaagggaacagttatataatccatgggacagccatacaacagaacaacacagctgtcagaaagagcaaggcgatgtgccgggcatggacatgcagacatgagccagcaatattcgaaggaggaagaaaggtgcaaaaaaaaagacctgtccaaaactgaaaagtatatatggagacatcgcagagcagcaagagaagcaggaatggaccagacacgaagggccaccaggctgaagggctgggctgtgtcctggggggactgggaagccatgggagggctgtgagcaggagaggagccgggcagctctgggggacagagtgaattccaggaggcccagaaagaagcttgggagagggtccacgccaagacaatagaggttcttatccccatttgacggcgtggggtggggctgtgctggtctcagaaccaggaagcggaggaagctggtgttctgggcccagcccagggctccttctgggaactggacggggcagggactgagcacagcattcaccacggggcttcctgccttagaatgaagatgcttacctggtgggaggagcatcagagtcccaaggccaaagaaggcttgccccttaagaaaccagagctgctggaggaaacagaagtacccaaaatgcctgaagctgacaccccaccagaccgggctggaggtaagtccctgggacagtcacaggcagactgtcaagcaacagggccgcaggccagggcccccaccccatcacctggcagaaccccggggaggcacttgttcaggacggagagacccaggccccctcgccccacacagcagatgctacatttgccaaaacaaagccccacagactgggcggcttgaacggcagatactgattttctccccctctggaggctggaaatcccaggtcaaggtgccagcagcagagcttccttctgaggcctctcaccttggccggtagatgctgtcttctccctgtgtcctcacagggtcatccctctgcgtgtgcctgggtcctaatttccttcccttgtaaggacaccagtcattgaattcaggcccatcatgtgacatcacttaaccttaatcaccgatgttaagaccttgtctccaatacagtcacattctgagtcactgggggttaggatgtcaacatatgaatgatggggggtggggtggatccacacttccgctcataacagaggcttaaggaggctgcttggattcccccgtgttgggtacttagagaggggattgggcttgtctaaggcagcggagcaaccgactgtggttctcccaaagtctagggctctggagagaaagaagagtgtagactccgagatggatcacggcatgcggcccaggacgtggaaacctggcccaggcagaggtgcgactccatcccagactccagacccagaggccgtcgcccggctctcacccatttcctggggaaacatgccccggggcctccccagcgccagccctcatgttagccaatgtaggggacacgcctaacacctgacacctgcccaagggacacgccaccccagcagccaggctgacaggagcagaaacaaaacacacagggatacgccaggcgggcagcaccaggaaacaggctgctgccgccacaggggccgctgtgagcccagaatggatccaacccagcctcagccttcttcagagagagaaactgaagcatgctcagcacgatgggaagtggctgaaaccctgaagaacccccaagagcacatccacggagacactgggaaccatgaggccccagcctctgcacatctgcattgcaaacagggaaactgaggctcaccgtgcctcgggccacactgcaaggctgtgcactgctcaggactccggaacccgggacccttgtcccccgctgcagcagctgaccctgtcctggacattttctcctgactttatgagactctagtgcagaggttgcaaactcagatgctcacagccaccaggcagggaacaagaggggcacagttggcctaatgggggccgtgtctgtcttgaaagcagctgcccctcctgaaggcggcggctcacagtggcggaactccctccgactcctccccaccccctccccacaggtcaggaacacggggagactacagctagctcttcatatttttttttgtttgtcttttgaggagaatccagagatctcgatttcagtgtgaaatatcttgattccggcacattagcaattgagaacatgtttttaaaaggcagcgccgcgtgggtcaaagaaaaaccctgatgagccttctcatttgcaaactcagatcagaggcatagatgtggaggggactcctgctccctgaacacccttcctgcccacagcaggcggggttattcagaacgcagacgctttgccaagggcaacaagaatccccaggttctgggaggaagcttgtgtgtggaagagtaaggagggatttctaggtagagaaaaacattccaggtgttcactcatgtcactcatgtggccacaaatccccggaggcctcctgtgtgccaggccgcgggctggggacaaagagaagtcagacccaggtcctgcccataagacctccaggttgttacacccttcgagcagggccagggctgtgtcccaagaagcatggggagaggggaggggaggaggagctggcattgagggagggagggcttgacccggctcggggagctgagtgttgctacctgagcccagcaggcatgcagggagaggtgacagcaccgccaggcacagaaagctgcaagattgaaggcaggaggcatggtgctggggggtcagagcactccagcaagggcagagcaagcagcatttctagggcaggaggcagacaatggtgagaactgagccaggcaaggggccacaggctgcgcctgggtaaagctccctgcaaacaggcctcaactgtcgccccgctcaccctcaggagaaacaagggaggagctgatacctgggggatcagcttccccctctctctgaaggacatgcacagtggtgacaatgtccctgagtttgacttcagtcctgatcccccaccaattgaaaggtcgtggggactaggagggtgacttcaggaaaaatgtggcatccatatgggtgggctgagggatgagcgcagcaggggcccagcagctccacagatacaggtgagattggaaagtggaatcatctcccaagaagtggatattgggctgaactctttccccagagtcaagggaaagacacaagagggcactccaggtcagacagacagatggggtctaataccaggctgtgtttccccgtctaggctgaggtcactgccggctcctcaagattccctgtagggaccagagggggctgagtccatggagcaaaccgctaattggccagtggtcagttgtgtgcatttgtacatctacaaggagaggatccaaggaggaggccatggcaggtggctctgtacaaacctctgttccctcaggagatgacggaagcagccgtgatcactgtcctggccaggactgagggtgacccaagccctcacaggccttcattcacttaagccagagaccctgtggaatcggtcccattatcatgcccattttacagaggaggaaactgaggcccagagaggctcagaagcctccctgaggttacgttcctaccttctgagacagatgctatccccctgcccttacccacaaggaagttgaagttcacaaaggggaggtccttccagaatctcacagcctggggacaaagccagatttgagatggccctgccctctcctgcctgctcctaggagcaaggcccatcaggatcacatcaggctcacttctccccattccagagtgcagactgtggaagggaactgtctggggccctgcagccacttcaggctttgctggctccaggagcaggtctaggctctccctcccattgaccctcaaagtctagtctctctgtctctgtttctctctctctctcaattccatgcactctctgtgtgccctgtaccctgctaaatttggagaatggctgtggatagggctgccaccatcccttcctctcccagatgcggattcccccaaccatgggacactgcagggtgggggggtccgtgggatcatgaacttcttctgcagtggccacttggacaacagagctgagccacctgtgtttacatcccagctctggccctgagtgtgggccactcccatgttccctaaccccagctttcacctgcaaaatgggggtatagcataccgtggatcactgtgaggcacagaggagttcatgtttattcaggaaccagctcggggttaagggcacggtgacggcagcctgtgtctgttgcacactgtgtctgtgccaggccatgttctaagcacattacatgggtcctcttgtttatatccatcagggttccaccagggaaacagaacgagtagctgatccttatacaaaggcttattgcatgggagtggcttatgtgattctgagagctggctaggcaggtgctatggactggatgtctgtgtctcgccaacatttttaagttgaaacttaacccccactatgatgcggtctggaggcctcggtgtggactgctacaacaaaataccatagactgagtggcttataaacacaagaaattcatttctcacagttcgggaagctgggaagtctaagacttcttatttcttctcctgggcaacctccattctgctcttaaggcctttttgggatgtgattaggttatgtaggtggaactttcatgaatgggattcatgccctaagatggccgggcatggtggttcatgcctgtaatcccggcactttgggaggctgaggcaggaggataactttagctcaggagtttgagaccagtatgggcaacctggcgaaaccccatctctactaaaactacaaaaattagccaggcatggtggcacatgcgtttggtcccagctactcggaggatgaggcaggaggatcacttgagcctgggaggtggaggttgtgccactgcactccaacctaggtgacagagccaaaccctgccaaaaaaaaaaaaaagacctaagaggccagacgtttcctcttctaccatgtgaagacatagcataaggcactgtctgtgaaccaggatgccggccctcaccagacactgaacatgctggtgcctggatcttggacttcccagctcccagaactgtgagaattgaatttcttgtgtttataagccacccagtctgtggtattttgttgtagcagtccacaccgagtaagacagcaggtgtgaagtctgtagggcaggcaggcaggaggggcagtctggaaactccagcagcagctgaagcgaaattctttcttttcccgggaaacccccattctgcttttgaggcctttcaactgattgaatcagacccacctacattattgaggataatctccttcacttaaagtcaactgattagagcaaaaacaacaacaaaaaggtaactatgagacgtgacggatatgttaatttgcttgacagtagtaatcatctgattatgtatatatatatatatatcaaaacatcatgttgtataccttaaatgtatacagcatagtcaactgattagagacgtcagtcacagctacaaaatccttccacagcgacatgtctcagtgtttggttgagcagctggggtctgtaacacagccaggttggcacataaacagaccatcgcactgctggtccccaccatggccctgtgaggtgggttctgagattatccccatcctgtagaaaaggatgaggagactcagagaggataaggagcccgcctgactgaacaaacggccgagacacctgagccagggctgggaacgccccttcctcacccccccgcgccacgtcccatccaaccttgctcagggaatgcttcagctgctattattagcaccaagctcggctccagggacatggcacaaaaaagaaaagtacatctcaaagtgggtaaccatacctgaccttgtcctaggaaacagagagtcggggagggacgtctttgaagatgagaagagttcagtcaatgaaagggataggaactaatttattctctcaaaaatatactaagggccaggcgcggtggctcatgcctgtaatcccagcactttgggaggccggggtaggcggatcgcttgaagtcaacgtggtgaaaccttgtctctactaaaaatacaaaaagttagctagctgggtatggtggagtgcacctgtagccccagccactccggaggctgaggcaggagaattgcttgagcctgggaggtggaggttgcagtgagccaagatcgtgccactacactcaagcctgggtgacagagcaagactccctttaaatatatactgaggctggctatgatggtatgcacctgtagtcccagctactctggaagccaaggcaggaggattatttgaggccaggaatttgagaccaacctggacaacacagcaagacgccatctctacaaaaaataaaaataatagctgggcatggtggcatacacctatagtcccagctacttgggaggctgagacaagaggatagcttgaggccaagcacagtggctcacacctgtaatcccagcactttgggaagctgaggcaggaggatcacttgagcccaggagtttgaaaccagcctggggaatacagtgacaccccacctctataaaaagtttttaaaattagcatgcagccaggcgcagtggctcatgcctgtaatcccagcagcactttgggagtccgaggtgggcagatcacctgaagtcaggagttcgagaccagcctggccaacatggcgaaaccccgtctctactaaaaatataaaaatcagcccggcgtggcagcgggcacctgtaatcccagctactcaggaagctgaggcaggaggatcgcttgaacctgggaggcagaggttgcagtgagccgagattgtgccactgcactccaacctgggtgacgagagtgaaactccatcatctcaaaaaaaaaaaaattaaaattttaaaaaagaattaattattttggaaagcctttgcatgaataaggcatgaatctttgaacacccctgagatttctaagcattgtgttcagtgggcttcaggccttgactcatgccctgcaaagccccctagcagaatggaacgctctccatgaataaagataaaagccaaagatggtgctaggtcagcgaggtcctggcctgaaaaagacagtcccctccagtgggatttcttaaacagactgtctaataaaggtacgatttgcagaggtgcgagcagtgttagggatgtagggatggtaaggatctcaggtgccagcaatgggaggagaagtttcctgccagattctgctgagtcctggaggaacaaagggaggaatggtatgaccgaggccttagtgagaactgggatcatggaagaggggctgctgatggcactgaggctcccaccttgggagcagcaggcagggaggaggggatcctccagccccttccagtattctgcctgtgcctccctttgaccaaacccacctcgaagttgaagggcaagggagcttgctgatggggtcagtagaggtcagcctcataggcagaggggatggaggagggatggtgtggtggactgaatgatggccctcagagacatcagtcctaacgcctggacctaatgcctgtgcatgctacctgataaggagaaagggtcattgcagatgtgatgaagttgaggctcttgagatgagattacccgggtttatccagctggtccctaaatgcaatcacaggtgtccttttctttctttattttttttattttttattttttattttttgaaacagggtctcactctgtcacccagactggagtgcaatggcaggatctcagctcactgcactgcaacctctgcctgggttcaaacgattctccagcttcagcctcccgtgtagctggaactacaggcacaagccacgcaatttgtcttttttgtagagacagggtttcaccatgttggccaagctggtctcgaactcctgggctccagctctcctcccacttaggcctcccaaagtgctgggattacaggtgtgagacacattgcccggctcacaggtatccttataagagggagtcaggccaggcacagtggctcatgcctgtaatctcaacactttgggtggcagaggcaggaggattgcttgagcctgggaggtcggggctgcagtgagctatgatcatgcatagctatatctctgtccattcaactaccatccagaccaagaagtaggacgtgcctactgcagaaggctcccttccacgtacctcctgctggatctccatgacatgtctcctcccggactctccccaaccagagtaattacaattctcacatctgttgccatggatcatttttgccaggtatgagacttcatataaatggaatcatacggtagtaatctcttgtatctggcacttttcactccacattatgcctgtgagtttccaccatgttttagcacgtatcaatagctcattccattttattaatgaatcgtattccatggtatgagtctatattaattcatttacacattcacctgttgctggatatttagctatcttcagtttgagacttgcataaatgaagctgcagtaaacattcatttgccagtctttgtggacatattgtttttatttctcatggataaataactggggtgaaattgctggatcataggagtgctcagctttagtagacactgacaaaacattccccaaagcaatcgtgcccatttacactcccaccaatgatacaagagagttccagcacttgttattgtcagtccttttcattttagtcattctggcagcagagtaagagtatctcctcatagttttgatttgatctccctgataacttatgctgaattctttttcatgtgattattattactattattttttggtctggagtcttgctctttcacccaggctggagtgcagtggcacaatcttggctcactgcagcctctgcctcccaggttcaagcgattctcctgcctcagcttcctgagttgctgggactacaggcacgtgccactacacctggctaatttttgtatttttagtagagacagagtttcaccatgttggcccagctggtctcaaactcctgacctcaggtgatccacccccttggccttccaaaatgctggaatgacaggtgtgagccactgcacctggcctgaatatcctttttttttttgtaaagtgcttgttcatgtcttttgcccattttaaaaatcaagatgtctcctttttgttgatttgtgagagttctttatatattctggatataagtttgttatcaagtgcacatatggcagatatcttctgtcatattctgaggatataggaagaaaactaaagttttcggctcactgcaacctctgcctcctgggttcaaacgattctcccccttcagcctccctagtgcctgggattacaggtgtgcgccaccacacctggctaatttttgtatctttagtagagatggaatttcgccatgttggccaggctggtcttgaactcctggcttcaagtgatccgcccaccttgggctcccaaagtgctgggtagagctgccaggccctcagcaggtgcaccaccctccaggaacctccatgtgttcagctatccagaagctctctgaacccagtccctttgggtttttaaggaggcttcattacagaggcatggctaattaaagcattggcctctggtgatgaactcaaccttcagcccctccctccttccgagaaattgggaggtgggctgaaagtcccaaccctataatcctgccttgacctttcttgtgaccagaccctatcctgaagctaccagccattagtcaattaattagcatacagaagacatcgctttggaggttccaagcatttaggagttgtatgtcaggaaaggggcaggaggaatgaagaccaaatatgtatttcacactatcacaccattcacccctggtctttggacatggttcccttataccaaaagaatatacaactcaaaagatactgccacgttactagaatcccattcaatcatgactaattggttcagtccatcatattgtatgaatgtctcccagagtaagaccactcaagtttgcagccttccattctatcttgtcaggttctaaaagcaggagtggtctctgcacacatatagtttcaccctctcaggcatctggtataattgagctaagagacaatgtcatcccatgttctgagcatctttcaaggtgttaacgtaatattagatttccttcattacataacccatttattcattcctttaccttcagctaccattcttccttctcttcatttatatacaaacttttccatctttgcaaggaacactgtgcttgtctggactgcaggcagcaatactagtctagcaagtacctgccccacaatccactcccattcagactgggtaaggttacacaggtgcagaaccagtgggctggtttcactaccagacaatatagctgcatccactattagccccagttttgccagatagggtggaggtacaatctgcctctatcaggcctttagggaattctgacaaaaaagggatatgaagagatttgttaaaggatgcaaaattatagctagataggaggaatgagttctagtgttctatagcactgtaggatgactccagttaacaataatatatagcttcaaatagctggaagggggatagtgaatgttcccaacacaaagaaatgaaacatttttgcaatgatggatatgtgaattaccctgattcaatcactatacactgtgtgtatcgaaatatcactatgtaccctgtaaatatatacgattattatatgtcaagtacaaaaaaaaataaccaacaaacaaaataacatagctacatttttttgcttaggaatcatccctgcttccagcacttgtagtttcaagacctggttctcgtcctagtgttactaacatgccaggggtttagtctagttcccattgctagatgcacagaaagccaacccctgagacaataagggttgccagggaagaagattttaactgggtgctgaagccaaggagaatgggaaatcagtctcaaattcacttctgacggactaaaactggggggtttatatagtggtgaaggaatgtaaaacaggaattagggaggagtaaggaagcaattgagaaatgagggatttagtctctcgttgtctgtgtggtataatctggtgagtttcagtcctttgcctgaaggtcagttccaaaggaaagaactcaagtgagacaaatgtaaatttcaaattttaacactaaaagggtcactttctaggtttattcaaaaactcagcaggtgagatggctcactcacacctgtagtcccagcacttctggaggctgaggcaggaggattgcttgaggccaggagtttgagatcagcctggccaacatggcgtgaccctgtctctacaaaaaagtttaaaacttgtcaggcatgctggcatgcatctgtaggatatgcaggaagctaaagtaggaggatcacttgagcccaggagatggaggttgaaatgagccaggtttgcaccactgcactccagcttggatgacagagccagaccctgcctcaaaaaaaacaaaatagtaaatgccacttctatgggacaattgggttggttttactaggaccactgcatcaggtaggagaaaaaaatgaggttatatctggaagaaagaaaaaaatatatagtcattatagcaacttggtaagaattgcatagccacaccagcattctccctacccccactttcccaggtcaaccagaaaacaggaaagtctagtggtgacgctcctctagtcccatcaggttgagtgtgagcacacaggagggcatgtaagccaaatcttcctgtttttttttaaatttttatttttatgggtacattaaaaaaaattatggctacatccttcatgcttttatctcccctgtttttgacaaccaaagttttaattgctcattccacttcttgatcaaattattacccaaaggacagctctctgcccattgctggacattatgggctagacagtgtgttccttggtcggaagaaatgacggcagcctgtgcaaatgtgtgtaatatattctgttctgattcttttacagcactctgagcatttgcatcttccactgggtaagcaaaggccagcccagagtcagcgtctattcctgtcaagacccatttgtagccccccagggctaccagcatcagcctcacttgccagctgtgcttgggaccttcccaccagggaatctggcccatagccatctgcagcttctgtctctcctgctggcaaacagaacagttcttattggcattatgtgcctgagagggtgcaatagaaacatatttagattcagcccatctctgcactgctgcagtgccctcatgtcctctcatttcatgcacccaggtggccacccagtgagcacacagggatatctgcttgtcgatttcaatcaccttccagacctggaagagagctcttctggtgggcattgacatgtcctaccttaaggacccctcaaatttccaaagggctgtgtgtgtcccatatggacatccctttaataggctaggtttccattatccacctgcttgactatatggccaagccattggccactgcctgtgagtcagtaaaaacccacacggaagggcttttaccactgttcaattcttcagcatgcaattcagctcactggacggatttgtttttatcttctttgatcagaatggcatccttctaaatagaacgtggtcttttcatcttggcactgtcatctgcacaccaagcagctctttgttggctagttgagagctgtttatagggcactgtccaagtggcagtaggatccagctgctccccatacgcttccagagtcagtccgagggagaaagaggctccttttttattagtatctcctccttgcattccctaggtagcatgatcctgtataaatcatttctaatttattaggggactcttctgggcattttaatctccattagagtgtttttaaacataatccaagagattattggtatttcaggcttcaagatcattttatgtcctcagtcataggggtagcttgaattaatatcccatagaaagtagtattatgctcttcaaattgaaattctgtagtccagagtctcagtagttgtcactggaaggtgcttataggctgttcccataggccccagtctgggttccatacagggctctgtctcagagaatttgtccatagcatcactctgtcttctattctacattttgtgggctccagagatctgactggttcctatttagcatgtccaattaatattgattaaaggcagatttacatggcttttgtttcataatgctaggtatgggaaacatttcccagtctgatacaacatccatccccataatataatcaggtaaaatcacttcagagaaaatgtgttcaaatataccaactctcctataaaggtttatcttaattccaccaaccctcactttcctaactgtagcctctattagaactttatcaatggtttttggtttcacaatactacaacccttaaatttttacattctctcaatctaatcccaagtcaggacttcaccaatggatgttggtaccatagtcagtggacctcccatatcaaggagtcccatgaatttctcttctgcatccctgatcattttgtccacttgtgtacataaggctttaggtccccatcagggcgttgagcaaaagaactcttgcttgttggttaatctttatcttgattaaactgccagactattgccccagaaaatttcagatcagatgtcttattttaatctttgctttctgacttttaaaatttctccaaactaaggtaaatacagcaaacttttttggaaccctttaatgttagggaaccaacaagtactccctttggcccacccaaccttaaatagtattatattaagacttttgttctaactccatcaatttctgttttactcatcccacttctgacaccaaatctgaggctatagggaagacaaccaaagtgctttttctattctctcacttaacaatcaacacttctcttttgattggtgtcaccaagaattgtgtagggatttctccccaccagcaaccaattaatcagttctgcagtggacacgaattgggtgtactccaattcaatcctcatacatctacctggacttcacagcagatcccacaagttgagggcttggtcccacaagactgtcccccacttccaatgccaattgtaggctccaggttctttacctgtgcttctgactgaccagctataaattggggttccataacacctttctcttcaattaattttttagagcagctcaaagaacttagaaaaacacttatgcttaccagtttattataaaggatattacaaaggatacaggtgaagagacgcacagggtgaggtgcaggggaaggagaatggagttgccatgccctctccaggcatgccaccttccaggaacctccgtgtgttcaactgtccggaagccccctaaacccagtcttttgcggttttttaatggaacattcattacatacgcatgattgattaaatcattgcccattggtgctccacttaactttcactccctctcccttccacagaggctgggagatgagctgaaagtcccaaccttttaatcatgccttgttctttcctgtgaccaacccccatactgaagctacctggggcttgccagtggacgtagcgggggtgttatgaagaccaaatatatatttcacagtatcacacatttatagctcttgggatgtaaaaaattctccatgtctctttgtcctcacctgtgaaatagggataaagataagtgctgcctcagaagggtgtcatgatgcttcaaggagataatatgtacaaagtgcttagaaagatccctacaccgagtaagcactcatattttatcaggcatgggatgggccatttcaggaagagggagctcctgttctcatcctaagtctgaacggtccggaattcaaagaggatcaataaatggcctttcaccaggatcacaatggattttgtagagtggtgggctggcaagctgattcagtgttcaccattgctgtggtgtaaatcctcccaacatggccagtttcaagctaataatggtttaacacctggcttgcacaatttctgaaaatttaataatcagctcttttgagccagtgcaagccacctgcagaacaccattaacttttgcatcacccagttttgtgaacgcaggcaggtctcttcctccctctgtatcttacttccctccatctctccaaacggagctaagccatccgactcactcatgcagtacgtatttatttgagtacgtactacatgtcagtcactaggttgggctctggaaatccagccttgaacaaaagcagaccaaaacaaaaacaaaaaactccgtgaagcttacattctggaagtgggagtagggggagagcaactaaaaataacagtgaaagaaggaaatcggccgggcgcagtggctcacacctgtaatcccagcactttaagaggccgaggcgggcagatcgcctgagatcaggagttgaagaccagcctgactagcatggagaaaccccatctctattaaaaatacaaaacgagccgactgtgatggtgcatgcctgtgatcccagctgctcaggaggctgaggcaggagaatcacttgaacccaggagttagaggttgtggtgagccaagatcataccattgcactctagcctgggcaagaagagcaaaactctgtcaaaaaaaaaagaaagaaagaaagaaagaaagaaaagaaaaggaaaaggcaaaagaacattgttagtgctatgaagaggtatgacgtagagttattgtgctgggagtagcagctactttggaaactatgatcaatgaaggcttcttaaaggggagaagatgagccttaaataagaaagagtcatctgccagtgtggtaggaagagcattccagcgaaagaacggcaagtacaaagaccctggggctggaattgttcggtttgtttaaggaatggaaagaaggtcacagcgagctgagtgattgaggcagggagtggccctagctggtccaggtgtttagtggtggttgttctgaaggtggaggcaaaggtagaggccaagagagtagagcataggctgctacagccagagtcctacagggagaggtggtgaaagctcagaccaggatgggagagtaagaaaaggacaaagcagagatttgttttggagacagagccagcggttcttgcagacaaattggatgtgagtggagggggaaggaattgaggatggatatgtttctgaggcagaacagcccctactgggtaacttcaaaagctcctgccttgaactgctacagaaataacgtagactcagagattattttgctcctgcgtatgccaaggggacgggaacaggagggtggaatacacctagtaaacagatgcaaagtggaaaggggagggagaaactcactacaggtttttgaggtgctggctggagccaggagctgctccaagatctctcattcttctcaataaccttgggcaatagggaattttccaccttgcaggggaagacgctgaggttctgggaagagaaatggcttgtccaaggtcacacagccaagtcagtgaaagaacagggagccaggatgttttgcacctaaaccctggattatggtttcctccccacctgctcccccaagataagtcccccaatcccttcccattgccttattatactggggatgagggttggggtggaggaaaaaagcaaatttcactccaaaagtcagtgttttcgttatccatgaaaatagatggaaaagctgaactgtggcccacaggaagaggggcctgggggcctggcctcctgggtctgagggaggagggggctgggggcctggactcctgggtctgagggaggaggggctgggggcctggactcctgggtctgagggaggaggggctgggggcctggactccagggtctgagggaggaggggctgggggcctggactccagggtctgagggaggagggactggggacctggactcctgggtctgagggaggaggggctgggggcctggactcctaggtctgagggaggaggaactggggacctggactcctgggcctgagggaggaggggctggggacctggactcctggctctgagggaggaggggctgggggcctggactccagggtctgagggaggaggagctgggggcctggactcctgggtctgagggaggaggggctgggggcctggactcctgggtctgagggacgaggggctgggggcctgggctccagggtctgagggaggaggggctgggggcctggactcctgggtctgagggaggaggggctgggggcctggactcctgggtctgagggaggaggggctgggggcctgggctccagggtctgagggaggaggggctgggggcctggactcctgggtctgagggaggaggggctgggggcctggactcctgggtctgagggaggaggggctgggggcctgggctccagggtctgagggaggaggggctgggggcctggactcctgggtctgagggaggaggggctgggggcctgggctccagggtctgagagaggaggggctgggcctggactcctgggtctgagggaggaggggctgggggcctggactcctgggctgagggaggaggggctgggggcctggactcctgggtctgagggaggaggggctgggggcctggactcctgggtctgagggaggaggggctgggggcctggactccagggtctgagggaggaggggctggggacctgggctcctgggtctgagagaggagggactggggctagtctcctaggtccatgggaggatgagattgggacttgaaggaggagggagctgggttttaggaagtatcccagactccgtgttctgcggatgtggtggaaagacgtggggacgcctggggcgggaggggtaggggccgggccgcagtaacaaaggcctctccctccaacaagcaacccccccttgaccccgcctccccggccccccacctctcctgattggccggtctccctgcccgtcagcgccgcccccctccccgggtctgcagcagctccagccgcctcgtcgcgcccccccagccccctccccccgcccccgccgccccccgggccggtgcagcgcaggcggggtccccctccccctcccccctctccccccaggcctcgcgcgccccggaccggccccccctttcccctccccctccgcgccgcctctgccgcgatgcccccccctgcgcccggggcccggctccggcttctcgccgccgccgccctggccggcttggccgtcatcagccgaggtaccgcagcgccgggggcggggggctcggccgggacgccagggtcttgggtgggtaatcgggggatcaggggtgggggtcgagggctgcatccctgggccggcgcggggaggccccgggacgccggggtctgggcccgggggtggggtctgcattccctggctgggcagggggacctcggacgtgggggtccgcgccccggggcaggggtcggcgtcctcgggccggagccgggtctaggggcggaggtctgcttccccgagcaggcaagagggtcgcagacacctagccctgcctgggggcaggagtctgcggctcctgttgaggagggggcagacactggactcggggtccccgggtcggatctccgaactgagttggggtggggggcaggggataatgccctgttaggggtcttcatctgtacgtggagagggtccctgaagaggtccttgccgggggctggggtagtcatctcgggacagaggtcaggggatggatgccttcccagggtcagtaagaggaggggacaagggtgtccacagacctagtcccagggtcaggaaaagaggggaagggtctgaaatcccccagcagggtcatctaggttgagagaaagtgttggtacttggggaggttgcagttatgtgggggagaagggagctggagatacaggaagttggggtgctgggctggggtcttggattcccaagctctgattgaatgtctaggttcgtggggctggacagtggaagagcgatgggcatgggaggatgaaggaaagacggaagggaagggttaaagcaggttgaagggttaaccccggcccggcccggccctcccagttggggagagggccaggggcaggtttctgcactgaggttagatagctggaccttgagtctccccagtagggcctggcaggcagggggtggtcaaggagattcctagatttccccctaagaaaagggaggagagtgcaaggaggcaggaggctggagggtgggcgctcaggagggcagggagctgggttaattcagactttctggaggattcccccaggccctcccctgaacaaagagttccagggacaaccaagaaccccgacagagtccccaagagtctcagagaggccgcccgcatagaccaagtctggcacagaaaccccgtcacagcgtcccacccgaagcagcacctgcagacaccagtcacacaaacacagccccatccacgcaggacgcagggacctggtgggccacagcctcagtcccttgctagtcctcccccgtctcccacctgaccagtctgaatcgccctctgactttctgaccacctgtctctgtctctgtcatgcatctctttaggtctttgtgtccctgccatttctggaggttcccatcccttcccatctctgttatccactgctgactttccacctgcctctgtctctgggtcattgtctctccatccctgctgctgacagcacagttccacatctgtctgtctctgcttttcagactgttgcccattgcatgactcagtctcttgatacttgcttgcttcctcacttatgccttaatcttcattaacttctctcatttccttctctcattcatttccttcttgttctgacctacctttctcttttttctttctctttccttctttctctttccttctttctttctttccttctttctctttttctctctctctctctttttctttctttctttctttctttctttctttctttctttctttctttcttctttcttctctttttttctttctttttcttgtttttttgagacagggtctgactttctcacctaggctggagtggagtggtgcaagcatacacagctcactgcagcctcaatttccctgcctcaagcgatcctgccacctcagcctctggagtagctgggaccacagatgcacgccaccacacctggctaatttttaattttttttctttgtagagatgggggtctcactatattgcccagactagtctcaaattcctggcctcaagtgatcctcccacctgggcctctcaaagtgctgagattacaggtgtgagccactgcaccagccacctcttctttctttctctccttgtccttatctcttgtcttcttcttcctcctcttctttccctgatcctgtaccctttgtgacctttcccccactttcctgtttcttctctccctccccttctctctctcactgcaacttcccatttttcacattcactattttttttttttttgaggcagagttttactcttgctgccaggctggagtgtagtggcataatctcagctcactgcaacctctgcctcccgggttcaagtgattctcctgcctcagcctcgcaagtagctgggactacaggtgtgtgccaccacgctgggctaatttttgtacttttagtagatacagggtttcaccatgttggccaggctggtttcgaactcctgacctcaggtgatctgcccacctcagcctcccaaagtgctgggattacaggcatgagccactgtctggcccccacattcattcttaaagtccctataaatcattacggggctagactggggcaggaagctgtggcagagccaggaggtggcttgtgaccctgctcaagtcttttcccatctctggtcttaggttccccttttgagaactggggacgagaggggatggggtggggttgagacagaacgagatgccagaaagacacccccacccacccatggatagtttgagctgtctgggaaaaaaagcttatggcaagatatgcaaactagcatcttctctcttcttttattcatgatcttgtccaagttacaagaggaatacactgcaaacagtccgcctctgataagggcaaaccccattgtgctcctgccctgccaccactctcacaaccactgtcttgagagaaccggtctgtggctggagtgcatccttccatagctttctctcacttctgcagacttagacacgacacacagaggacaacataagtgatggattggttggtttgttgatttttttcccccaaaatagaaacaaaataagcccatttctctgcaatcggccttttcccacttaaccatacctcccttacatccataaatattcatctatcttcaattcttttctaaatcttttatgccaacacacacgcaccccctcacatatacatatttatttacaaagcagctacattgtggtattttaaaacaattcaacaaaatcaaatggccgcttctgcagcagcaaatgaggtgggtggttcctttgcttctggggcagctagcagagtgatgatggtcaggagggggcaggagccccagatttgagtcccagcactgcccctgacaagctagctctccccaggacctctgagctccaggttcatctggcttgtgggctgtgcttggttgttggttcatatagcaaatgttcttggggaccagggccgctattctagacactggatatatacatatggcagtgagtgaaccaggcagtcactgtcctcacggagcttagatcatagtgggatggagagagatcaaagaccaaaaccaaaacctaaagacaaacaaataaaagataatttcagagagtgatgagtaatgtaaagaagataaaagtgacttggcctttgaagctcaagtggttgaggaaaccatctctgagcaggggagagtggagttaagacctgaaggaagagggaagtcaacctttttttttttttttttttttttttgagacagagtcttgctctgtcgcccaggctggagtgcagtggcactatctcagctcactgcaagctccgcctcctgggttcacaccattctcctgcctcagcctcccaagtagctgggactacaggcgcccaccaccacgcctggctaattttttgtatttttagtagagatgggtttcactgtgttagccaggatggtctcgatctcctgacctcatgatccgcccgtcttggcctcccaaagtgctgggattacaggcgtgagccaccacgccccgccggaagtcaacctttcaaagttgacagcagaggtaaagaccttgaggtgggaccaacagaaaggagggtaaagctgggcgcagtggctcacacctgtaatcccagcacttcaggaagccaaggcaggtgaatcacctgagctcaggagttgaagactagcctgggcaacatggggaaaccccatatctacaaaaaaaaaaaaaaaagccaggcatggtggcacgcaccagtagtcccagctactcaggaggctgaggcaggagaatcgcttgagcctgggaggtggaggttgcagtgagccaagatggtgccactgcattccagcctgggtgacacagtggtaccctgtctcaaaaaaaaaaaaaaagaaaagaaacaaagggaaagaaaaggtgtgtctagtttcaggattcttggcacagtgtctggactcccctggtgtcggtgacgctaatgccctcagattttttctttttttttctttgtttttcttttcttttcttttctttttttttttttaagacggagtctcgctgtgtcacccaggctggagtgcagtggcacaatctcggctcactgcaacctccgcatcctgggttcaagcaattctcctgcctcagcctcccaagtagctgggactacaagcacatgccaccatgcccggctaatttttgtgtttttagtagagacggggtttcaccatattggtcaggctagtctcgaactcctgacctcaggcaatccatccgccttggcctcccaaagtgctggcattataggcgtgaaccaccatgcccagccaaccctcagaactctgaggtcagcaaagggaggaggaccctcctggggactcctgggtgccagacataacaggcccagccccttctcacagcctttcccagccagagccgcaccccctcctccctgccccagtctcatgccccgcccctccaccccctacctcccaggtttcccacctgcgtcttctgagactgtggaatcagagtatcaccctcccgacccctgccaaccatttcagggttccagctttgcctaagctccttggcagggcggcagaagattctcacccccagcccaaggtcactcagcttgttagggatctctttctgtcttaagaaaagtcacctgcctaccaccttcattcccaggtttatcaaacaggtatgaggcctgtgcgtctggactgtaaatcctacgagggcagggaacaagtgagccctctgatcaccgccagacacctcccttgccacaggccggtgcctgccacataatcaccctaacagccagctcacggacggctgtttgcaagcacttaactggcaggcactgtactagaacctttacttggattacctcttgtaatcctccccacaacccagtgaggaaggcatgattatcatttccatttcaggtggggaaactgagtcccagagaggtgaagtaacttgtgtggctcagcagcagagctgggacttgaacccagctgcctggcagccacactgcattccctgggccccctggttatgcaaggttggctttatcagtagatgcttaccagggtgtctgcccaggagtcagtgactcagagcaactgacagcccagatacagccctgccctccccgctcccctgagtggagcatctagggagacctatgccaagccagggatagcaatagatggttcctaaaaaagaaggtgctgttaggaaccgctagcatttattgggttctttccgaatgccaacagctgagctagacacttctgcttgcatattctcacggaatccctcacagaaacccttgcagggaagaactactatttttcaccttgtacagttggagaaactgaagctcacactggccaggagtgggggtcatccagctaggaagtggtgggacagacgtttgatcttccaaccctagctcctcagggatttattatctggtctctgaggaccatccatgccctttccacaaacacttcccagttctgagattggctcgaccctggggggacacagctaagattcaagccatcacaaagctcctcatcactgtctcagctaagtcaaacagtgcccagaagaaggagtgggagctctgccttgaacagtcagaaaggtcctcctggggcaagggacatttgcattggggtcttgaagaatgagtaggagttcaagagttgaagagtgttgcaggcatccatttatattcatccattcaacaaatatttcccaaggcctctggtgggccaggcccagtgttgggagatgctggggacacagacttgagtcagaaccaagatttacccccaagaaacttctagtctgatagggaggccagatacagacagtcatcagagtgcaatggacaaagtcctgaggcacccggagtcctgccttccctgcagggtccacttcccaccccagtgaccagataataaagccctgaccaggcactctggctcacgcctgcaataccaacatttgagaggctgaggtgggaggatagcccaggagttcgaaaccagcctgggcaacatggcaagacctcgtctcttaaaaaaaaaaaagtagccaggtgtggtggtgcatgccaatagtcccagctactcgggaggctgaggtgggaggattgcttttgctggggaggttgaggctgcagtgagccatgatcatgccactgcattccagtctgggcaacagagcgagactctgtctcaaaataaaaacagaaataaaaaataaagccccaagaagcctggagtggtgtgtgggctcaactcatgggggcagtgcctgcttcaatcagcagctgagttcaggagccctggagcccctgaaccttagggtaggcaccttggacagctccctcttccccccacttcttggttcctgtaggacaatggctctcaacggggaagggggtgtgtgattttgccccttacggggcatctgacaatgtctggaggcatttgtggtggagaagggcatcaaatggatccagatcagaagcgagacgctgccgacctcctatgttgcataggacagtctggccccaaatgtcagccgtgctgaggtttaggaaccctggcccagaaggtgtgtcagcaggagcatagcaaatcctgtgtgtctgggggatagggcagggtacgtgcctgtctgttttcaccagcctaggaagggatcttggtgcgtacatgtgactctttggcagcactgaatgtggcactacccgtcgttcggtccaggtttttgttggtgactttccaattccctgtgtgtgtgcgtgtgtgtgtgtgtgtgtgtgtgcgtccagccgtgtgtgatctgatcacaggagacaacatgacctgattctcggcccagcgtggccccttcgtgcttgaggggatgtgacagtgttgctgtcttgttacacgggttgtagctttgtgtgcgtctgacccagggccttccaaagtgcaaagttgggaatcatggtgctcgcaccagtggtgtctgtgtaaccagttaggttagtaagcgtgtgtgtgtgtctgtcttcaccagcctgggaagggatgtaattgtgtgtggactttgcagccatgtgtggggctgttgatgtcgatggaaccatgtgggaactattgtatatgatggggtgactcagggtgcagcattgcttggcctgaatgtgacaatatgagcgctcctgggacagatcctcctttccagctgacctgctgctgggtgcctgtgcagagctgggtctgtcagcatcactgtatatacacacctgtccctctgagcgggtccacagccatgcgcgtgactgagagggtgggactgtctcctgtgtttgtatgcgtgtgattgtatgtgtttgtgtgtgtgtgtgtatgggtgtagctggagctgtttgtgtctgtatgactgtgtctgtacctctctgtctgggtaaggacatagcaagtgtggggactatttctaggcctggagaggtctccgtgccttgtccaagcctgtgtgtgtatgtgtgtgtgtgtgcacgcgcgtgcacgcgtgcatccatcatccatccccaagctgtctcctgttgctcccagggctgcgtgtagcagtgtccactgtgtttagctcggggagggtgagccccctctctccattctctttaaatcccagcagtgactctggcatgagggggcccagggtgaggggctgcagggcccagccccaagccccagagcctgccaacccactgcacctggctccgtcctggccccatcctgtggggctgctgatggagagggcccccgggagtcattggggcagcacgggccattaattcattatattaattagctcttcgtctgggctgggggcagggcagccccgcgcaggcccctcccactccagaagtccaaggtcatccagccggccttcctccctctccgcctggtgccagctccaccgcctccgcatgcccagcccccactccctggccctggtccagcccgctggccacggtctacagagagatgactgcgtgggggtgacggagcctgcctgctgtgctgaagtgtgcgagtgggcatgggctcacacctgcaagcatgccctggcaaacttgagcacacagtgtgcctgtgtagatgtgtgtgtctgcaaaggtttgtgtgtgtgtgagggtgtatttgtgcatctgtgatggatgtgtgtctgagaatgtacacatgtggatctctgtgcgcacgtgttcatatctgtgtgtctgcaggtctgttacatatatgtgttatctacatgcatctggttttatgtgtatgccttcggtacatttctgagttaatgtacgtgtgcatctgtgtacttgtgggcctgtgtgtatatatttgtgtgtattcacgtatatatgtgtgtttctgtgtgtatgcatatatactatgcgctcatctttgcataggtacatgtgtgtctgtataccgtacctatgaatatttgtgtgcccatgtacatgtgtatttgtgtgtgtgtatgtgtgtatacatgtatctgtgcataagtgttctgtgtatgcaagtatctgtgtgttgatgtacctgtgtatatgtctgtgcgtgtagaccatgtgtggatgtgtgtacatatctctgcatatgtatatgtatctatggtaattgttggggttctttttgagaccaagtttcgctcttgttgcccaggctggagtgcaatggcgtgatcttggctcactgcaacctccgcctcccgagttcaagtgattctcctgcctcagccacccgagtagctgggattacaggcgtgctccaccacacccggctaatattttgtatttttagtagagatggggttttaccatgttggccaggctggtctcgaactcctggtctcaggtaatcctcccacctcggcctcccaaaatgctgagattacaggtgtgagccaccgcacctggccgtatctatgtaattgttaatctgctcatattggtatgtgtgtcgctgtactctgtatctgtgaatgtatgtgttctgtgtacacaggtatctgtgtctgtgtatatgtgtctgtgtgtatgtcttatgtgtacatgtgtctgcatgtatatgtttgtacatatgtctctgtatatatatgtgtctgtgtacacatgcatctgtgtgtatctgtatgtgtgtgtttgtgtgctacgattgtctctgcatctctggaggtgtgtaggtttgtatgtccatggacacctacccatctgagtctgtgagtctgtgtgggctcatgggaagatacatgttgcatgtgtctgctgtgattgtgtctgctgtgtgtgtatctctgaaaacatcagtgcatgtgtgtggcagcgggtgcaggagacgtctgtgtccgcaaggacgtgtgtgtgcacgtgtggtgcatgtgtgtggcagcgggtgcaggagacgtctgtgtccacaaggacgtgcgtgtgcacatgtgtgcaggtgctaccatgcccgggccttgcctgagctgccaaggctgagccacccccaccttccacagggctgctctcccagagcctggagttcaactctcctgccgacaactacacagtgtgtgaaggtgacaacgccaccctcaggtacctccctcggtgggtggggactcagatctcatggagccatgcggtcctgccccttcaccttcctgggtggggatcctggttacaggaacagcctgggatgggaagacttgggctccacattccccctcagtagcgacacagctatgagctggctccccctcggcttcagtgtccccatctgtcaaaggggtggagagagggggcagagacacacacagagagagggacagagacccagagagagagagggacagagacccagagagaaggggacagagatccagagagaaggggacagagatccagagagaaggggacagagatccagagagaaggggacagagatccagcagagagggacagggttgctgtttccccaggtctccacctctcctcaccctggtctctgttcccccctctctccacgcctctctctctctctctctctcgcttgctctctctctctctctctgtttctgggtctctgtcccccctctttctctgggtctctgtccccctctctctggatctgtctctgggtctctgtccttctctgtgtgtgtgtctctgtccctctctgctggatctctgtccccttctctctgagtctccctctgggtctctttccctctctctctctgggtctctgcccccctctctctctgggtctctgtacccctctctctgtgtgtctctgtccctctctctctgggtctctgttctcctctctctttctctgggtatctgtcccactctgtctctgggtctctgccccctctgcctctgggtctctgtctccctctgtctctgggtctctgtccccctctctctgggtctctgtctctctctctctgggcctctgttcccctctgtctctgggtctctgtccccctctctctgggtctttgtctctttctctctgggtgtctgtatctgtgtgtgtgtgagtctctgtcccctctctctgggtctctgcccccctctctttctgggtctctatccccctctccctaggtctctgtagctctctctctgggtctctctctctctctctttctctctccgggtctctgtccccctctgtctctgggtctctgtgtctctctctctctctgggtctctgtccctctgtgtgtgtgtgtgtctctgtccttctctctctgggtctctgtccctctctctgggtctctgtccctctctctaggtctctttctccttccttctgcatctctattcctctctcccagattctctgttctcccctttttgtgtctctgacacacacgatcactcaataaccacgagctattgttccgttctgcagttgggctcacagctttccctccctgaggctcaacttacccccagctgtatggtgggcacagcagcatccgcctcacagggctgtggtgggacctggagatgcggtggcctccttctcccacccaccccctcggtgggggaagcctcaggctgggtgggtggagaaaaaccttcccactcattctccctgcagctgcttcatcgacgagcacgtgacccgcgtggcctggctgaaccgctccaacatcctgtatgccggcaatgaccgctggaccagcgacccgcgggtgcggctgctcatcaacacccccgaggagttctccatcctcatcaccgaggtggggctcggcgacgagggcctctacacctgctccttccagacccgccaccagccgtacaccactcaggtctacctcattgtccacggtgagcccttggccggggcctggctgggtggaggggttgagagcgtgggggagactaggcatgatgacagataccacgtgttccccaaccccagggatacatagcgagaaagacagacacagccttgcccttggggatttcagcccagcagaagggggccagttacacagacagtgacgcatcaacatgattgcttctagggcaggagagctacagggatgagggggtgcttgggggaagaccacgttcatttgttcagccccattcctggagggcctactctgtgtaagcattgatctacagaacaaggcaggctgtccccacaccttgggagctgattttctgaggacaggctcagagaggacttcccagacgtgacgtctgagctgacgcctttggctgggcacagggctaagaccggaaaagaaacagtgtgtgcagggccaggcaagaagatgagccaagtgtgcaaagggaagtctcatgaggctggaagcgccagatccagagcaggagagatggggctggagagctccacagtgaggcgagaggcagagggcatctgaaatggtggagggtagggagcacctggagagacaggacctggagacagagagaatccagggggatcctggcaagctccaactctggagccagactgcctgggttccaacctcagtgccaccgtccaccagcccagggaccttgagcagggaagaggcccgggactcctttgcaaaatggggatggtgctgtcatatgtcaaatcccagacgtcgtcaattagaagagctacttttattttatgccctactagaaaagaaaaaacaaaaacactgccagcgataccctggcatcctatctcgagggccatcctgcttggagaaatgttcaaatgggagaggggagtggaaagcacagatgacttagaattgatgaaatacagtaacatccaccccagaggctggtagtgagcatctaatcagtggatttgggtaaagcacttagaatagcatctgttacacagaaagtcccatgtgggtatttgttaaataaatttatttaaaataataataaatacaaatagagacggggagaggaattcagaccccaagatggagaaaccaagttaggatgaaggtggagagagaatagagacaagaccagcaattagacaagaagatgccaggcccagacagaggtttcagagaaaaaggcagagactcctgggtctgagggagaaggggctggggtactggactcttgggtctgagggaagaggaactgcgggtctgaactcccgggtctgagggaggaggggctgggggtctgaactcctgggtctgagggaggaggaggggctgggggtctggactcctgggtctgaaggaggaagggctgggggcctggattcctgggcatccatattcagcctctgccgctgcccgcagtccctgcccgcattgtgaacatctcgtcgcctgtgacggtgaatgaggggggcaatgtgaacctgctttgcctggccgtggggcggccagagcccacggtcacctggagacagctccgaggtgaggaccccatcccaggtcaaaagccccgtcccccactgcgcagtctgggcccctccattccccatatccctagctagtttccccagcccccttctccctggccccttggcttcccctcccactctgcttccagttatttcatccacagaccacaaaccccagacctaagaggcgtcaccactggctttccacctgccgtcctaggcctgggccactgcttctgcgtcacttgccaaaccccagcctgcgtcacttccccaaccccagtgtccccgatgtctccccacgcgctcacagcattctcctgggctgagatcccctgccactaggtgccctaagccaggctgcaccagcggtcctgcgtacatctctgcctctctcttctgctggacgctctagcccagcgggcctcatggtgtgggccccagacccgaagcatcagcataccttgggaacttgccaggaatgcactttcccaggctccaaccaagacctgctaaatccaaagctccctctcgctccacaagccccaagaaccagtgctcaaggttacccacaaacggcgccagagtgcccatatatgacagtccaggtcctagacatcacccaccagcccttttatgtggatctccaccaccagatcccagatccctggatcctcattctcagggtctttgaagacccatggtgccagtcactagatcccattccctgaatccctggatcttaccccactgggtcatctgagccccatgagcctggtcttgacatctgggaatctctggatgccctaagtcccagagggtcttctgagactgctgctgtgttatgagacccccatatacttggattgctgatcccaatcaccagatcctgattccctagaccccatgaatcagatcccagaacgagggaccctgccccactggttctgtatttgctagatccttctgagacctaacatcctgggatccccctccccattggggtcctccccacggagctccatgatctgagtcagattcctggagggatctcctgaacccttagattctctaacccaccccactgggttccaggaactgagtcccagacctcactccttcccccacccccagctggagagatcccaggcccccggccctgcagcccctcccccaccccacccccattgacccgggcactccaggccttgccgtgcccgccccgctgatgtgtgtccgtgttgtgcccgtgttgtcccgtgttaagtgtttgtgtccggccccgccccctcctcctccttccccccacagacggcttcacctcggagggagagatcctggagatctctgacatccagcggggccaggccggggagtatgagtgcgtgactcacaacggggttaactcggcgcccgacagccgccgcgtgctggtcacagtcaactgtgagcccccctggcactgggcacgaaagggtggcggacccccgagtccctggggaggagggatctgggggaagaggaagcgggggcgagacttacgggcctgagggaggcgggggctgggggcgggaccccttcgtccccacgcggctaggagaattcgctgacccttgcccctcgccagatcctccgaccatcacggacgtgaccagcgcccgcaccgcgctgggccgggccgccctcctgcgctgcgaagccatggcggttccccccgcggatttccagtggtacaaggatgacagactgtgaggacagcactgagggggccgtgggagcgggaaggggaggtctttagtcccttcgattgtgaggcagggggacggagcggggcgggggaaggcagcagagctctgggtcccgaacctggggcgtccagcttctaggtgatgggatctgtccagccccggagacaagcttgggtccccgcttgatgaatgctggaaccccgtctccccggacttttcagggagctggccaggggtcgggggtcaatgctgaggatctgtcgggcaagatttaggggaccagcagagttcaggagtccctaacgactaggggtgcactacgggagagtccagagtcctgagaggccagggtgcctggaggggggcggcggtgggagtgacccgaggtacatgaggtgctagaacccgaggcgatgggtcactggggtagggggcagaatgctgggtcaccggggaacggaggagcctgagagtcggggggctggcctggctgggcgctgcggcccggcccctgacccggatccctggcaggctgagcagcggcacggccgaaggcctgaaggtgcagacggagcgcacccgctcgatgcttctctttgccaacgtgagcgcccggcattacggcaactatacgtgtcgcgccgccaaccgactgggagcgtccagcgcctccatgcggctcctgcgtgcgtcttcgggcggggcggggccgggaaggtgggcggggccgggggcggggctagggaagtggagacgccgggaccgcccttcaggctggccctgaacttaggagatggacgctgagactgaaaagcaatgcgagtaagaaaccgatccacgcaatcaatattcattgagtgccagctaagggtttgtcgtgggggacgcagctgtgcacaaaagaaacaaggtttggggattcgcagagcttatagtctagtaggagtagaaaagcaataaacaagtggtcatgtaggtaaataagcaaacacatacataaacaaaaaataattttggaggccgggcgtggtggctcacgcctgtaaatcccagcactttgggaggccgaggcgggctgatcacctgaagtcaggaatttgacaccagcctgtccaacatggtgaaactatgtctctaccaaaaaaaaaaaaaaatacaaaaattagccaggcgtagtgatgggcacctgtggtcctagctattcaggatgctgaggcaagaggattgcttgaacctgggaggcagaggttacagtgagccgagattgcgcctgggtgacagagcgagactccgtctcaaaaaaagaaaaaaaaaaaaaaaaagaaacagagtcagaaaagcaggcacacccaatgagagatccagaaaggacgctaaagagtgggctcagaagagatggggcccctggagagacacacatggggttccccactctcaggcctccctccatgaccccttctcttcccccaggcccaggatccctggagaactcagccccgaggcccccagggctcctggccctcctctccgccctgggctggctgtggtggagaatgtaggcgcaacccagtggagctcacctccccctgcagggggcctcaggccaagagtgagagaaacgggggagcaagagccgtgggtctcgtgggggcagaagagctctcggccaccaaggaagaagagagaggagaagaggaggaggcagaggaagaaagatcttcagagaacccatcactgtgagggataacgcaaaattatgcatctttctacagccattctcgccacccgttcacgtttccgattgtgacccactcccgccaccccatacccctctctcttagctcaggctgtcaactggcttgtgtgggtgtgggtgtgtgagtgtgagcctgcatgcatgtgtaggtgtctgtgtctctgtttgtgtgtgtgtgggggggtgggctgggggaagggactcagccgtcctcccgcccccaaaacccccatgtccactgtccccaaccctattgcctctcacctctggctggaggtaggtatgaggctctgcagtggaagctgtgaagagaggcttaccaggctccctgcttccccaatatatgcacgcacactacccctccccctgtcgaaagggcaactcctggcaggttgggagtggggaggggcatcgcactcacctgtcaagctgtcattcagcctttgtgagtaagtgggggacctccatctaggctctgggcttccctgctgtcaaccaccagcttcctgtagccagaggccccatcgctggctcagtggcctgagaccttcccacttttcctgtccctccacaccctggattttctggccccctcctgggccaatcggtgcttccatccaactgtcagactggtggcaggagtcacctgtctgtttcagtgctttgccctacccttgccaccactccccttggccttgatttccccacctgcggcaccagccagctgcccttggggcctttgcagctggcccacaggtgtgagcttgctggtctatcacttcctggcctctccaccaactgtacctcccaaaggctacctgaccgccctcacagacactcagacgcaccacacacacatacacacacacagacacacacacacacacacacacacacaccagcgactgtgaccagcaatagccccctggctccagctgtccggtagctggtgactagctgtatttccccctgggtaggcatctggtgtcaggaagggacgctgagaggccgcagcctcagctctgactgtaggaacactccaccctggtacaccacaccacacaaagtgggggacagagaggcatcacacagacatcctgagcccagacaaagatgccatgtcaccaactccgactcccaggagaccctctatataaacacccaccccaaaccacaccacccagagtctggtggagaaaaggagagggcaaggcgcagtgactgtacctcagacgggggcatgggccccatcccacattgtcttccattcccagggtccaggggatggggtgggacaggggagggatgctagggagggggtggggggccctgggggccatgtgttccaattcatggggagtgttgagaccaccacaccaataaacgcctttttccaaagtctgcctgcaggtgtcaatgtcattaaggattagagttaatgaagggcaaagggtagcagtcaattggtggtgcctctccagcatcattcctaccgcctactttctcactggtagacttggaatggactcattacagagatgccctgtgattggccgaagacacccagcatagcccatttcccaccgtgattggctcagagatgggcacatgacccagtaaggctaatgagaaagtgaatggattcccaagaagagatgcttttctgctggatattgtggctccgtgatgtgaagtcaacatctgtagggttgcttttctccatcacatggagagatcttggctctgtggggatagcaatggtggggaggacagcatatggagcctgagaaggataggaacactgtgaagggcagagtggaaaccttagagaaactgagtccatgattatatatcatttgagcagctggatcaaaacttaactgatgcccattttcacttatataagcaataaagtcccctgtatatttaaaccaatttgcattggattttctatctctagtaataaaaaagagaatgaaaaccataatagatacagaagagacatagaaggcccagaaccccaaccctcacctttccaaaaggatccaggggttctattttccaatggccttttctacccccaatcattaaccagaaattctctcacatgctttccttccctgagacagatgctggttgcccacatttgagttgtttggttcccctttcttcttcgctggcagatccacgtgttatgatacaggctagatatctggtttcctagcctcctttgcagctatgtggccagtttgggccaaagagacataaatggaaatttgcttgtaggtttccaggaaagcttccctcccaccccatgagagggaagaaggcagtgatagagggaggtagagggtggggaagatgtatagggaggaagttctgcccccttccttttatctttggatacagttgtgtgaagatgtgatgactggagctgcagcaaccatcttgctacgtgaagcaacatgcttagagtcaatgtgccaacccactgagggtggcagagcagatggatgcaaagggcccatgtctttaatggcgttactgagctgctgagccagcctgaaaccagccgcctccatagttcttgccaccattttattttgttacttgcagtcaaaagaatcctcaccaatgcactctctaaattctcaattagaaacccagctgaaaaagcaagacttacgctgaagacagcagcagcaagcccaactcttcactggcaccaaaacatttgatcagtcaacaaatatttattgattgcctgctgtgtgtgaggctctgggttaagtgctgagttaatgatgtggtctctgcttttgtaaagcccttagtttagagagagagtctcaggccacacaagaaattacatatttatgtatcaggaacggcaaattcaaggattctgggacttaacccaagactaagggaggggtaagggaacggtcgtctaagatggtaactgctactcttagacttgagaaatgaatgacatatgggaaaaagaagtgttataagcacagcaaactctaggggcaaaataaattgtggctgagagacagactgtgatactggagtccgggggcagagaaagaattgggaggggaggtcagggaggccaacagaggccagaccacaaggttttgaaggtcacgacgatgagtttggataatatctgaagggaaatgcacaggccgtagaagcgtttaaagagaagagtgacatgatctgatctgttttaagatgaagatgctgggagctggatggggtgtggcctacaggtggcaaagtgaatgtaaggggaccttttcagagaacatggccaagctccctctctagctcagagcaacacagcaagccctgcctgtctgctgcagaggcttggaggttgtgcaaaccacacagttagatcagcaagagtttcccagccaagaagtcacatctccttacttgcacaaatacaggaagactcttcttctgcagcaagagagggagacagaaagtcccactttcagggtccaaccctcagtcatagcaggccctggctgctgctggagtgaaataggaagttctggcccaaaacgccctgtgcagggcagaccactggctctgatcacacctgtgtggctgcgcgaacagtctttgagcctccgcctacagagacaactgaactggggtctgtgcctggaagagagaggtggggtgaggggagaactcagtaggtactctggatgtgacataactcacccgcctaactttttctagctcttgcttgaactttttagagattatctgggaaccctccatttggagaggggaaaaaaaatgcctggctatccttggtggagcgaagccagccaacaacccaacccagttgttattttttatttatttatttatttatttattttgagacagggtctcactctgtcatccaggctagagtacagtggcaccgttagagctcactgcagccttgacctcccaggcccaagcaatcctcccacctcagcctccctagtagctgggactacaggtacgtgccaccatgcccgactaattttaaaattttttgtagagatggggtatccctatgttgcccaagctggtatcgaactcctgagctcaagtgattctctctcctcaaccacccgaagtgctgggattacaggcatgaactatcacacccagtcacaacaatccttcttttatggggaatgaggtaactgtaccccacttcatagagaaaaatgggccttgcccaatttttatgggaaagaaaaatggaggggctgggcgtagtggctcatgcctgtaatcccagcactttgggaggccaaggtgggcggatcacttgaggttaggagttcgggaccagcctgcctaacatggtgaaatcccgtctgtactaaaaatacaaaaatcagtcaggcgttgtggtgcttgcctgtaatcccagctactcaagtggctgaggcaggaaaatcgcttgaacccaggaggcggaggctgcagtgagtcgagattgcaccactgcagtccaacctgggcaacaaagtgagactctgtctccaaaaaaaaaaaaaagagagagagagatcctatttccctcctttggagaagaaactggaattcactcttattttaatatacatcaaagttgggcgggaagctctgtccaactttgatgcatttttaaaaaggataaagttatacagactgtaaactaacaagtaaaactggagttagataattgagaccctctcatctccctgactgtaatacaagaagttccgccccgattccaggaggaaatgagggcacccacactcacttggtaggccctagttgagctgtggtcctccagagggactttgaggtccagaggccatgaaatctccactggggtcacactatgcatcttcttttctgagggggtgaccacggggaccaaggtagaaggatgcttctttttctcaggagtctttcctgattgagaggcagaagagaagcaggaacacgtgattggctgccccaacatgccaacccagccaatagcaagggaagctggttggagaggcggagccttatgctgattggctgatttggaggtaggagggcaggatggatgacctatgacggcactgattgcctcagccaggtcttccataggcctctttctagggtccctccccgttggtcatggttgccccttccccagtccccttgctcaccacgaaagcggcacaggcagcagatgcaaaggaggagaagtacggctagcagcgccaggcccagcagggagcccaggacgatgccagcgatggccccatggctcaacgtggggcctggaagagacaaagagaagaaagagaaggggaacaggaaccaaggttggacccaagtttcctaagccccctaactttgtgctgggacccaggagtccggcccccactgtccctcccctcccagaacccaggaatgtgggaccccagcactctcaactcatttaacagttactgagtgaccgtggtgtgcctggctctcagacaggtagtgaggattcattcgtgggccaaacaggaaagatatctacccttatggggcttaattctaggagagaagacataaataaatgagcaatacataagataatcacagattgtcccgagaaagaaaaagtgatgtgatagagataatgggggacaggtgtggtggctcacacctgtgattcccaacactttgggaggtcaaggtgggcaaccacttgagcccaggagttggagaccagcctgggcaacatagcgagatcctgtctctacaaaaaatagaaaaactagccaggtgcggtggctgcgcctgtagccccagctactcaggagactgaggcaagatcacctgagtctggggacgttgaggctgcagtgagcccagatcgtgccactgcactccagcctgggcatcaaagtgagaccttctctcaaaaaaagaaaacaaacaaacaaaaaacaaaaaaggaacaatgggaagggatgtgacatttagaaacagtggtgagctcaggtccctgaggaagtaacgtttgaacagagacttgaagaataaagaccagagacagtcatactaaacccggggaaagggcgttccaagaggagggaacagtaaatgcaaaggcccagaactagaaaagctttctctgttcaacgaaggccagcgtgggtggaggataaggaaggagcgggctggaggtggagagtgaagtagaaaaggtttccaggaaccagatcctaaaggggtcctgcagaaattaatggacggcttttatgtagagcagcctcatgatctgatttgcataactttggcttctgtgtggagaatgcattatctgacagcaagagggagtataaagagaccaaataaactgctgttgcagtccaggcaagagaggatgctgtgtttgaccagagccttggggtgaagatggaaaatattttagaaggaaaatggaccgaacttgctggcaattaggatgtcaggggtgatgtggcctgtaagtggtgacatttatgaggatggggaagactgcagggttggaggatgcagttttgagggaaaacatcgaaagatctgttttgggcatatgacatttgggatgctaattggacatccaaagtgaagatcttgactcacgcctgtaatcccagcactttgggaggccgaggcaggcagatcacttgaggtcaggagctcaagaccagcctggccaacatggcaaaatcctgtctctgctaaaaattcaaaaaaaattagctgggcgtggtggctcacacctgtaatcccagctactctggaggctgaggcaggagaatcacttgaacccaggaggtggaggttccagttagctgagatcatgccactgcactccagcctgggtgacagagcaacactctgtccacaccccccacctccccaaaaagtgaagatcttaagttgggcgcatccttttcaagagagaagtcagggcccaggataagacatttgggagtcatctgattattaatgttattgaaggccatgagcatgaacatgatcactttggggagtgaggactaaatcctgagatgctccaatggaggcatgttatcaactgaattgtgcctaccccaaaagaaaaacatatgttgaagtcctaacccctgttcctgtgaatgtgactttattttggaataaggtctttgaagatgtaaccaagtcaatttgaggtattagggtggaccctaatccaatataactggtgtccttaaaagaagaggacagaagccaggtgcggtggctcacacctgtaatcccagcactttgggaggccaaggtgtgtgggtcacctgaggtcaggagttcaagaccagcctggccaacatggtgaaatcccatctctactaatacaaaaattagctgggtgtggtggcgcatgactgtaatcctagctactcgggaggctgaggcaggagaatcacttgaatctgggaggtagaagttgcggtgagccgagatcatgccattgcactccagcctgggcgacaagagcaaaactccttctcaaaaaagaagaaggagaaggagaagaagaagaagaagagacacacacacagggaagaagcctgtgggaagctggaggcagaggttggagtgatgcagctgcaagtccaggaacgccaaggatgaaacagccgccaccaggagctaggaagacacaaaggaggattctacacagggtctcagagggagtaggaccctgtcgacaccttgattttttttttttttttttttttgagacggagtctggctctttcacccaggctgcagtgcagtggctgatctcggctcactgcaagctccgcctcccgggttcgcgccattctcctgcctcagcctccccagtagctgggactacaggcgcccgccaccgcgccaggctaattttttgtatttttagtagagacggggtttcaccgtgtgagccaggatggtctcgatctcctgacctcgtgatccacccgccttggcctcccaaagtgctgggattacaggcgtgagccaccgcgcccagccgacaccttgattttagacttctgacctccagacctgtgagagaagaaattcctgtagtctcaagccatgcagttcatggtactttgttagggcaggccccaggacactaaaacagggagacacggaggatctggcacaacagagaaggtctactctgacagccccaactcaccggcccggtagacccggctttgtgatggagtccctggctggccccccaggatgggcaggatccgaaaggtccaggtccctgggttccgaggtggaaggggcaccacggctgaccgctcctgaggccccaggatgagcagggagacccagtccctgtaggtggaagtcctgcccagagcaggcccatctggccatgcctggatctcaaaactgctgatcagggccccgcgctccacatcccaagtcagcacggctgcatctctggctctctgaagcctccacgaggatatggagggtcctagagggatgtgggggtggctggattcttgggtgccagaggggagagggaagggggctggggggctgggctcctgggtctgagggggagggggctgggggcctggactcttgggtctgagggaggagggggtgggggcctggactcctggatctgagggtggaaggggctggtgacctggactcctgggtctgagggaagaggggctggggctagacccttgggtctgagggaggaggggctgaggcctggactccagggtctgagggaggagaggctgggggcctggatccgaggtctgagggaggagaggtctggggcctgaacttctgggtctgagggctggagcggctggggacgtggacttcagggttttttgaaataacgtggctcaccaatgagggtgatctggtcaccgccagcacccagcgccccactgcacagcacggagtaatttcccaggtcccaatccaggctgaagttgccgatgtggagtttccgcccatcttgactgagccgcaggcgactcccgcctcctggagccaggggcctcccttcccgggcccaggatgcccgtgagggtgggggacaaccagaggcctccagtgccacctctgcctcccccaaccgtgtctctgccaccagcggatgcagcagcacctctcggggggcctctgccggtgggagaagtccagttaagaaagtcaagaccttaccttggattcaaagaacagatcctatgccctactttaaatcagatggtggtaagcccccacgctttggccacctgagaaagaactgccaatttactcactcattagctcattcattcattcattcatttattatctgatttcctcatcaaacacttattgaacacataccataggcgcaggccctgtactgggaaactcatattattttcagctattctttcttctttattattattattattttgtagcaataataattacaagactgggtcttgccacactgcccaggctggtcttgaactcctagactcaagcaatcctcccgcccccagctaccaaagtgctgcgattattgcgcccggccttgttactttttaaaatatcactgctttatctctctgaacacgtgtgaaagtgatggccttcttcctgtgtccagaaaaatacccccatccctgcaccccgccaccatgaggtataggaaaatctttgtcccttttctagtttgaagacagtgaagtcctgcctctttcttggactaaggacgtaccccataccccttcagaattttcgaaggaccaaagaaaaagtctccctcctcctcgagaaacagcaaaaaagccccgcgccctctcacccggcgtgactgtgcaggtacgcgtggccaccaggtggcgagcaaggcaggtgatggggacgccgctgagccgggggtgggcggggacggccgccagcagcacagaggacactggcccggcgcggatgccttcggggagaccctggaactgcagggaggcagcaggggccccgccgggccacgagcagcggaagcggaggctgcggtccccgggacccccttcaactgagcactgtggggccccggggggcaggtctgcggagagaagggagagaatgaagatggagtccctttctcatttcttctccagccccgcctccccgcgcggtgactccacccttcttcactagccccaccccataggcgctcacactccccacttttcctgcgatcccgttcccttttcccattaacttcctcgctaagtgggtagcccgcagccctgctgactgcccaactttcttaagaaaactgcatcttcacacaatgatatttctcttcccaaacgtaactcagccccttcctttccagctccacccacttctgccaggttacttcgccccctcctggattgcactccgagaagcctccccttttcccagatatctccgcccttccttgtggaccccttcccctttctaagacaattctgcccgctttctaaatgacctcgcccctttccctggtgactccgccccccttgccaggtaacttctccctttgctgatcccacttaagcaaattagttctttccttttctaactcccactctttgccatttaactccgcttgtcgactttgtcgagtgttccatgcccaggaatgtccgccctctcagtgctgggccggcccgtcagtcctggtcatccctgccactctatttggctccttcccttatcctctttctggccccgcctcttatcctaggtgtctccgcccctccgcgctggcccgccccaccacgggtatcccagctccttcttggtgacccgccctcccgctggccctgccccacccaccggtatgctgctcctccttgctggccccgcccctttcctctagccccgccctcgttctggccccgcccctctcccaggcattcccctactcccgctccagcctctcacccgccactgtaaggttgagcagcgagcggcggcggcggccggtacgcgggttcgccgccaggcaggcgtaggtgcctgcgtggcccggtccgaccgcgggcagcaggaggcgcgaccccgcgggcaccgcggcctcggccgggtccgccaggctccacgtgatgtcggcgggcggccgcgaggcggcggcgcagcgcaaggtcacgttactgcccgcggtgacaaagcgggcaggcgcggcgtcgcggtccgaggagaccgtgatggtcggcgggtccgggccgtctggagggaggaggggtcgggaccgcgagtgtcagggtcacctgggacgccgctaggactcccggagactgggtccccagcccgcttctccccaaggaccccctgtccccgacccgaggcatcccccactcacagaagacgctgacgtcggcggcagcctccctgtggccgaaggggctgcggacgcggcaagtgtaccgggcgtggtcgctgcgcacagggcgcacgatgagcagctggtcgccctctgagcgcatccggggcgtctcggctccctccgattccgccgcctccagggcgcgtccgtcccggctccagctcagctccccgcgacctggcccccaccccaggcagcgcagccggagctcggccgccccctcctctgtctctggagccttgggctgaaccgacagctggggtaggggctctgggagagggagaatgggctcaggacccacccagtcctggagcccatctttggtccccttagagggaaccccagccgctgctccctctaagcccctggagtctcagcccccatccctctcctctcataaacctatgagtttgagcccccagacacctcctctccgggacccaggagttcgccagaagaggctcctagcctcctcctcctccctcagacctgggagttcaggctcccaggagtctccatcccaggtccacctttgctcagacacccctgccttgacctctagctctttttctcccttcctcaacccagaagtcctcttctcctatccagggaccccacagcaccgtgacttgcccaaagcctggcagagcagagcagcccctgccgcctgcacgccggacgccagggcccacttaccatacacacccaccgtgaactcgtgagtctgctgggagacccctgcccggatgacctcagccgtgtagacccctgcatcgtccagctgggcagaggcgagctccagaaccccccgggcctggtcaaatcgcaggtggtctcggtgagcagggtccaggctgatcagaggtgcccctggccccaggcccccagctgccagcacctttgagccccggcgccagaccaccagagaggtggggggcccagggttggggattgggactagggggagccggatggtggtccccaccagcacagcgagtgggccccccacctgctggggaaagcttgcagctgagtgggtctctgcagaaaatttggattcagggctctgggcagagagtttaagatccatatcatccggggagaattttgaatctggggcctcaacagacagtttggtatgggagacttgagtagaaatgtttgaagctggggtcttaacagtgaaggaaggcttggggtctttggcaggaacttgaggatccgaaatatcaggaaatacttcagaaccaggggtttcagagaagggggaaaccgggctcaaatcttggccctcagcagaaacatttgaccagaaggacccagacatgttggaactcagggcctcaggaaaccagctggaatcagagattccagcagaggcttttgaatccaggaactgatctggaactttccagctgggaggtttgatggagggaacttccacacccagcccctgggaagagctctttgagtctgaagagaaggcagaggagaagttggtttgctgaagtccagaagaggctctgagggtgaggatccctaccaaggaggctgcagagaagagaggaaggcattgggggaggctgctgagggagactgacagggaagggactgagcagggaacttacccaggagtaggaagagtggcagagcctgtgggttgtccatggtgctggcctcactgaaaggacactggagagagacccaggactgcacccatccctcccgggtcagacgagtccaacaggactggtagcttagcttcctgggaggggaagggagccagacccagagggaggtgccaagatcctcaaccccagtgtggtggctgagctgcccacctcatcccactctcttcattagctggtcccatctgcagagaggcccagcctgatccctgccctccccacccccagggggaagctggagaaaacattcccagctaaaaatgtgggagcaaatttgtgagacaaagccaggaagacttcctggaggagggtgaggtgacctttccgagagccccacctctgatggccacagcttcagagcaggcttcctcctccccagcctcctggctccttccactctgtcttgcctgcagcctcagatacatctgaccctgctcctcctctgctccaaaccctcccacggctctctgttgccctcagaaccaagtctccaggtgctatctcctgccagggcctctatcctgagaccagagctgcatttccgcatccccgaggccctcacatggcctgtgtcccgctaaactcagactctttcctctaacccaaacttcctcacacctccaggatggcttcactgtcttcgcaaatgctggagaacattcccacctcctccctccctgtcaccactgtcgatctgagtccaaccctcctccccctagttctcactggccaggctctgtcttctcttcctgccccgtctccctcctctgcccagtctcctccattccctgccagggtccttctatacccagagctgaacctgcctccccctgctcacagccctcccctggctccccagtgccctctggagacatccaaggttcaaagcaaactcatgcacagcccccactcaagcacttgaacatcctgccattcttatcctgcccgcccatctcacctcccagtcctctacctggaatgctctctcccactctccacctccctccaacctggctaaaccacaacttgtccttcaggtctcaccttattaagaaccataattaccacttaatttgagccaggaactacgctaaatgtttcctatgcactatcaggctgaacacttctaaacaccctataagctgagtgtcattatactcactttgcaggccaggggacttaggctcagagaggtcaagggacctgcaggaggttgcacagccagagggagaagctggacttgggaccaggatggtcagaccattgactccttctgatagcttttcccaccatcccatgtggagcttagggcctctgctcagctcccagtcctctaagcttaccctggcccagttctcaccagtaataatactggtaatatatatatattttgagatggagtctcgttctgtcacccagtgagtgcctcagctcactgcaggctccatctcccgggttcaagtgattctcccgtctcagcctctgcagcagctgggagtataggtgtgcatcaccacaccaggctaatttttgttatttttaggagagatggggttttgccatgttggccaggcttatcatgaactcctgacctcaagtgatctgcccgcctcagcctcccagtgttgggattacaggcgtgagccaccgtgcccggactaatattggtaataatatatatttagcattttttgcatagcaggtgtggttatgggggtgctacataaattaacctttcaaaactccatggagtagatgatgtagcttaaagagggctgcaaatttgagcgtcctcctgttaagatgcggggtctatgtcccctctgcttggatctgagtagctgtgtgactgctggaccaagacgtggaagtggccctgtgccaggatctgcatctaggccggcatatgccactttctgtatcataggacactccctcatggaatccagccgccacactgcgaggatcagcagccccatggaggggaatcatggcccctggtcagcagccccagccagcttgctggctatgtgggtgagccctcttggaagtcaatcccctggccccatttgaggcacatgaactgatcctgaactggatccaggaatggatccagtgggatttgacccagggccctgggacccagaacccatacccttaacctctacatgatgctgttactattttcatctgcagatgaggcaactgaaactcaaaataggaaggaactcacccaagatctagctggcaaaggtaagagtgagcatatgaaatcaatatatctgactctatcagaaggccagaggaatggaacacaattttttaaataaaaaattagtccaggcgctgtggctcacgcttgtaatcccagcactttgagaggctgaggcgggcggatcacttgaggtcaggagttcaagacagcctgggcaacatggtgaaaccccgtctctactaaaagtacaaaaattagccgggtgtggtggtgcaagcctgggcaacagagcgagactctgtctcaaaaaacataattaaaaaaaaattaacctgactgtagacccaggctgttcattgcaacgctaagttttgattctctgtggcttgtctgtctcacaccagaaccacagcttctggcctcattctctcctgtgtccctgctgagactggggacacaagagagaatgagtgtcctgcaaacatcgtggataaaagcccttcttctcacccacctcactgatatttgtgttccaacactcaacttggaagtcatctccctgggaaatctctgaccccaccggctgggccaggccaggtcccccagttgggttcccaagggcccagtgtgcctccacgtctagcatacttcaccccgaattacagctgcctttgtcctcattgtcccccgcatcaatacagaggctcctcatgggcagggactggatccacagggcctggcacacaaaagactcaagtaaatgttgaatgaaccaaataatgggtctctaggaaataagttaacagagatagatgttgagagtcagttttattgccatctctgggaggggctcaaatccgcccaatctccttcagcttggccaccaggtcctcagtggtctccaccttgacgccggccgtgcgctggggcgggtcctccacactgatcacagagagcttggaggtcaggtccacacccaggtccccaggcttgatcacctcgatcttcttcttcttggctttctgcacatgggaagccattgttcacagggctgtggaactcctgccacccttcctgccacctccttcccatgggtgccaggcctgcagaccagtcccatgggctgaaccctctggacccacccactggccaggacacgcgaaacttctcacagggccacacctggtgtggacaactcctgctggctaggaggccctgggaggcccaactactgcagcagtcctcctttaggtaaccaaatcaggaagcccttcactggctgcaacagagtggcaaacccatccttttggtagtaatgactcagtggacttttggttgagatggcatgctgaaggctcccaataggctgagatgatgcactgaaccctccctatagactgagatgatgcgctgaaccctccctataggctgagatgatgcgctgaaccctccctataggctgagatgatgcgctgaaccctccctataggctgagatgatgcgctgaaccctccctataggctgagatgatgcgctgaaccctccctataggctgagatgatgcgctgaaccctccctatagactgagatgatgcgcagaaccctccctataggctgagatgatgcgctgaaccctccctataggctgagatgatgcgctgaaccctccctataggctgagatgatgcgctgaaccctgcctatagactgagatgatgcgctgaaccctccctataggctgagatgatgcgcagaaccctccctataggttgagatgatgcgctgaaccctccctatagactgagatgatgtgctgaaccctccctatagactgagatgatgcgcagaaccctccctataggttgagatgatgcgctgaaccctccctataggctgagatgatgcgctgaaccctccctataggctgagatgatgtagtgaacactctgtaatggctgaaatgactcattgaaccctccccattagttgagatgatccagtgaaccctccctgttggctgagatgaatattctctattggcggagatgacccactaaactgttaatattggccaagatgacccagcgaacccatctactggccatgatgattagtgaactctacctgttagccaagagaccccatgcacccttcctagttaactaagatgatctacatggtaacttcacattggcaaaaattaccaaggggaccctccctaatgaacctagatgacccagtgaacttgttccactggctggaatgacaaagggaacaccttctgctgcccagcgaaggctttctactggcctagataccagcaagccctccctgctagccaaagcagcccccatgaactctcagtattggcagagatgacccagcaaactctctctatcagccaaactccaggtgacggcttcctgtgcacgagacctcctttggatccttccctccccacgtgcgaccaccggggggcactgggctggcaatgtgcttgccacccccaggccctcagtgcccgctggccaggggctcaccatgatgttgggcagcgtggcgtagcggggctcgttgagcctcaggtcagctgtcaccacagctggcagcttcaggcgcagggtctccaggcccccatcgatctcccgctccactttcaacttgtccccctccagcgtcacctgggaggcgaatgtgccctggggagggacagtgtaggaggagagtgggtgaggctaattcaggtccgacccgagcagtctgcttatgccactactgagtacacgcatggactagtgaatgaatgagggagcgaacaatgcagggtcccatgaggtttagaatcgagcttgtacacctgggagagggtctttttcctttccctgagagccacggtgtatgtcctgatgtcccatgtcctgatgctgccagtgaggcctccctgccttcctgacagggaacatgtactgagtgctgagccctgtgctaagcaactgatgtatcaagtcatcgaatcctcgcaggaactttatgaggtaaatgttattatccccactttacagatgagagaaactgaggcagcaagatgctgagttacacgcccactgccacccacagctggtaaatccaaaagctgacaatctggctcccaacggccccccgtgaggcccctccgctgggcagacaacagaactgtgtgtgtccacaccagtccttaaaccaccttctgggaccccgtcctctagccaggtccctttgcctctcagtcctgaatcaacatttcctcccctggtaactgatgccacctacactcctctttgtctaacgacctttgtccctgtccacttattaactggacacatttttcaggtcttagtgtgaacatcacctcccttcattcacaacctcctcctagtgcccttatgaacctgcccctggagacacactgtgaacacgaccagtgaagcaccagcttgggtgggctcatattctgccagggaagacaaccagtcaccagggaaaaacacacacacacaaatgagatcatttccaatcagaaggaataagaagaaaataagacacatgatatgagagcaagaagggcgcacgttggagaagctagtcagacagtggtaaatgctttgaagataaaacaggataatggttttgaatgtgttgtcccatccagtagccactggctgcgtgtggctgtccagccagtgcagctgaggaatgaatttttacattttatttaaatttaaatactgataatttggccaggcgcagtggttcatgcctgtaatcccagcactttgaggggccaaggcgggtggatcacttgaggtcaggagttcaagaccagcctggccaacatggcgaaaccctgtctctactaaaaatacaaaaattatccaggtatggtgatgcacgcttgtaatccgatctactcgggaggctgaggcaggagaatcgcttaaattcgggaggcggaggctgcagtgagccaagatcgcgccactgcactccagtctggggacagaacaagactccacctcaaaaaaataaaaataaataaatactgagaattcaagacacattatcatgattgtggtgatgatttcatggatgtaacacatatcaaaacttaaattttggagggctgaggtgagcagcttgcttgagcccaggagttaaagaccagcttgggcaacatagtgagacccccatctctatctaaataaaagagtttaagaaaagcaaacttaacaaattgtgcaacttagatatgtgcggtttattgtaggtaaataactcaacgaagctgtttaaaaaaaaaacaaaaacaaacaaacaaacaaacaaaaaaacacagatacccaatgcagttactggaaatgcagttactagaaaacttttaagtttgttttgaacaacttgggtgtgtaaatctatttcaactgtcatctttaggaatgtgtttctcatagaaatttagcacctgaattgagatgtgctgtaaatataaaatacatgctgaattttgaagatttagtacaaagaaaatccaaaaaacgtaaaatacagatggtccctgacttatgatggtttgaattaagatttttcagttttccgatgatgtgacagtgataaacattcagtagaaaccatactgccagtgtccgtacaaccattccgtttttttagttccagtacagtatttgataaattacatgggatatttagcactttattataaaatgtgctttatgttagattattttaccccactgtaggctaacgttaagtgttgtgacatgtttaaggtaggctgggctcagctatgatatttggtagattaagaatattaaatgcattctctcagttataatattttcaatttatgatggatttatcaggacgtaaccccattgcttgtagagcatatgtatcttaatatttttatgttgattacatgttaaaataatattttagatataatggggtgaaataaaatataattttgtctgtttctttttacttttttatgtagctgtgaaaaattttaaatttgtctatgtgccttgcttctttttttttttttcttttgagacagggtttccctctttcacctaggctggagtacagtggtatgatcacagctcactgcagtcttgacctcctgaactcaagggatcctcccacctcagcctcctgaggctggtactacaggcatgtgccatcacacccagctaacttttcttttttggtagagatggggtctaactatgttgccaaggctggtctcgaactcctgggctcaagtaatcctcccaccgtggcctcccaaagtgctaggactacaggtgtgagccactgtgccaagcctgcatttcttttttctttttttgagacggagcctccctctgttgccaggctggagtgcagtggcgtgcgatcttgcctcactgtaacctccgcctcccaagttcaagcaattctccctcagccccctgagtagctgagactacaggcgcacgccaccacacccagctaatttttaaatttttagtggagacgaggtttcaacatgttgaccaggctggtctcaaactcctcctgacctcaagtaatccacctgcctcggcctcccaaagtgctgggattacaggcatgactcaccatgcctggccccagcctgcatttctattggactggcagagatggggactggggaacctagagttgagcgggtgggcatgagtatttcacgtaggatggcaaggaaggcccctttgaagaggtgatacctcagcagagacctcaaggaggggaacaagaaagccatgaggcaatccgagggaacagtgttccaggaggagagaacagcaaatgcaaaggccttgaggcagaaatgaagtttgagggatgagggcctggccctcagcaggtgctccccactccagtctcacctgtggccagtcaagaaatccagctgtcatctgccctgtctggttacagtcatcatcgatggcctgaatggggagagacagaagactgtatgacaatcagtggagctcatggaccattcaggcctctgtctagaacaggggttggcaaactttttctttcttttttttctttttgagacggagtcttgctctgtcacccaggctggagtgcaatggtacaatcttggctcactgcaacctccgcctcttgggttcaagcaattctcctgcctcagcctcctgagtagctgggattacaggcacccaacaccacgcccagctaatttttgtattttcagtagagacagggtttcaacatgttggccaggctggtcttgaactgctgacctcagatgatcccccaaagctctgggattacaggcatgagtcaccgcagccagtcgggttggcaaaccttttctatggtggaacagatgtagtaaatatctcaggctctgcaggtcatacggtctctgtcacggtgactcagcgctgctgttgtagcacacaggcagccataaataatatgtaaatgaatgtatgtggtgatgttccaataaagctttatttacaaatcagaggtcgctctgggccatagttcactgacttttggtctagaacgatcccctcacttgggcccagagataagcagccacttgtccagggacatgtggggccacctggcatccctgtcgtcaagtctctgccctctgtataaagcctctcaggagtcccaccctatgtggcccctgggcagctgcatgaacagggtctgggccagcaaggacattctagccccagcccagtgattggttcagggaggggcacatgactcaagctgcaccaaagaagagtcagccctgggagtttgctggggcccttgggaaagatgctcctttctttctgctggggtcactgggctggtgggatctgagcctggagatgcagacagtgaagacaaggtagaggggagcctacagctcatatgtgaccctggatcaagctgtgcctgaagcccctgatttacgtgagataataaattcgctttctggcttaagccagtttgagttgtgaatctgcttcctagaacaaacagcatcctgaccagttcatccggcatttccccagctggaggccctggccccaggaactgtccctggcccaggacaggtaggacatcggagtctgagaacgaccagcaaatgcagggggctgcaaaggccatgcttccagcacctcggcctctgcagccccacccaggccctgcctttttggcctgttctccgggtaggcccttcggccacagttgactgatctgtactctgatgcccctgctgttgataatctctctctgttttcttctgactttctcagggctgggcaggacacccagtgacctacctggacccatcagcctcctctttgtcccagaactgacctggccctgggatccccatctctctccgggggccccagctctacctgagcctgctgtgctctgctgtctccgtgctctgcttgacataccttgcagtctttggccttccttctcagcctcatccctaattccctgcctcttctcactcccatctgcctgtggctcttctgacgtccctcttctgccccttccctggttgaggccatgaggtttgccctcaaatgagatgagctacccctgagcagaggtggtgcccgagggtctcctgggggaacagatgagctccatgtacccctatctcagtggggagcaccagtgtggcagggaaggttctggtcgggtcctcacccagccctaacctccttccctaactcctggcctccaatttcccattccagtccattctcaaagcccaggggggctctttctgcacctagtgctgatcccacccctcttctgctcatagaactcccatagctccccagtgccctccaaaattctcaagtctttgtttcaagcccaggcctgtctcctgaacctgcatcgatgtctcctgggctcttcacactccccttgtaggatcctcctctaacctcctgttcttcctgggtttcctacctgtgttaccaaggcagacccaggcactgtccttgcctcctccctgccctccctccccatgctaagcccagtctctcctgccacatcatgtctctgctctgtcctgtcacctttggctgaggcctcattctcccccatgtgaccatcacctcggcctcccagcctctaaactcacccaaaaggatctttcttctttttttctttttgagacagagtctcgctctgctcccaggcaggagtgcagtggtgcctggagtgcagtggtgcgatcttgtatcactgcaacctccgcctcccaggttccagtgattctcatgcctcagcctcccaagtagctgggattacaggcaggtgataccacacccggctaatttttatatttttagaagagatggggtttcaccatgttggccacgctaatctcaaactctcgacctcaagtgatccactggcctcggcctcccaaagtgctgagattacaggcgtaaaccaccgtgcctggcccaagaggatctttctaacacccagagggactctgtcctccctgctcaaactctctgtcagaagggtcagcaaagtcccaagctgctcagcctggagtggtgaatgccctgggcctggccagctgctgtctcaccccgtatctccaccaccctcctcccgagcagggatgagcaagggggcacagggagggctgaccacagctacctgtttgcccagcagcaccaggtccaccttctccttctctgccagcttggccaggacccgagccacctgcaggggacccaagcgttctgcttctgctgggggcacctccacgtggatacctcggtctgcacccatggccagggcggtacgaatcgtctcctgccaaggacagaggggcttgacttggctgctatcctcagggggacctaggagtctggctcgcagcccctccttcctcagacccaggagtccagggccccatcccctccttcctcagacccaggagtccaggcccccatcccctccttcctcagacccaggagtccgggcccccatcccctccttcctcagacccaggagtccgggcccccatcccctccttcctcagacccaggagtccgggcccccatcccctccttcctcagacccaggagtccgggcccccatcccctccttcctcagacccaggagtccgggcccccatcccctccttcctcagacccaggagtccgggcccccatcccctccttcttcagacccaggagtccaggcccccatcccctccttcctcagacccaggaatccaggctatcagcccatcctccctcagacccaggggtccagacttccagcctcctcctccctcagacccaggagtccaggtcccagcccctccttcctcagacccaggagtccagggccccatcccctccttcctcagacccaggaatccaggcccccatccccttcttcctcagacccaggagtccagggccccatcccctccttcctcagacccaagagtccaggcccccagcccctccttcctcagacccaggagtccaggcccccatccccttcttcctcagacccaggaatccaggctatcagcccatcctccctcagacccaggggtccagacttccagcctcctcctccctcagacccaggagtccaggtcccagcccctcctccgtcagacccaggagtccagccccctccccaagaccttcatcacctggcactgtgcaggcccacagctgacggcgatgacctccttcaccagcttcttctccttgagccgcacagcctcctccaccgcgatctcacagaaggggttcatggagtgcttcacaccatccgtgaccacaccggtcctgtcaggcttcactcggatctgcccagcaggaggggaaggggtggggtcaggaggaaacaggcaagaaggtgggggcctcagcgccaaccctctcccaggctggatgaggacaacgacagcctggaaaggggcagggccttgtccggggtcacacagctccagggacagaactgggttagagtttgtaggcaggggcaggtcaccctgtctccttctctcatccagccattcctgggtaccagggacatctgacttgatcatccctactgttgtcactgctcctctcaggcctgaaagagtgtttctcaaatttacagtatttatggtaacccacagtgagaggtacattttactgtatctccaagtgtatataaatacataatacactgatacataaatacaaatgaggagaagaaaaggaaaaaccagttaggtagacagttaagggtggtcctcagaggagcagcctgcctgaaaaatcacagctacaggcaacaatagagcagcctggggaaaactcaagctgcccagcacagaagccttttgttctttgcgtgactgacaggctcccaggaaaagttccctccccttttcaggcacgtacatggtggtctctgtgggaacttgcacggggaggggcggagcttacctaaaacaaacccacggttacagaaacaagagaagcggagctttgtgcttgcctaaagacgtacccacaactacatagataacggagagttatgcagatagctttacagataagatactcaaacagctacagagatgaaaggagtttcttataaaagcttttggtgtcttttgctgtgcagaagctctttagtttaaccatcagagtgaacaggcaacctacagaatgggagaaaatttttgcagcctactcatctgacaaatggctaatatccagaatctacaatgaactcaaacaaatgtacaagaaaaaaacaaacaaccccatcaaaaagtgggcgaaggatatgaatagacacttctcaaaagaagacatttatgcagccaaaaaacacatgaaaaatgctcatcatcactggccatcagagaaatgcaaatcaaaatcacaatgagataccgtctcacaccagttagaacggcgatcattaaaaagtcaggaaagaacaggtgctggagaggatgtggagaaaaaggaacacttttacactgttggtgggactgtaaactagttcaaccattgtggaagtcggtgtggtgattcctcagggatctagaactagaaataccatttgacccagccatcctattactgggtatatacccaaaggattataaatcatgctgctataaagacacatgcacacatatgtttattgcggcactattcacaatagtaaagacttggaaccaacccaaatgtccaacaatgatagactggattaagaaaatgtggcacatatacaccatggaatactatgcagccataaacaatgatgagttcatgtcctttgtagggacatggatgaagctggaaaccatcattctcagcaaactatcgcaaggacagaaaaccaaacaacgcatgttctcactcataggtgggaattgaacaatgagaacacatggacacaggaaggggaacatcacacaccggggactgtcgtggggtggggggaggggggagggatagcattaggagatatacctaatgctaaaggacgagttactgggtgcagcacaccaacatggcacatataaacacatgtaacaaacctgtacgttgtgcacatgtatcctaaaacttaaagtataataataaaaaataaataaataaataattttttaaaaaaaaagcttttggaatcaactgtaaaaatggcaacccgcttgggcttccctctcctctgtggagagctttcttcttttgcttattaaactttcgctccaacctcaccttttgggtggtctatgctctttaattctcttggttgtgaaacgagctcggataacaccttagacaacgtgaccagtgaccctgacctatttcacaaatgccactgcagtgtaagggtcagtgaccaatactgaccctgcctacacacacaccatactctgacattttctaccctttttcggaaaaatgccagccctctgcctggatgtcatgatcacacatggtcacaacctaatttggaaaacaccagcatgaaagacctctttgctaaacagacaagggaggtaagggaggtgggtggcaaaccccacccatttgcttctgcacatcatttttgtctctcctgggccccactgtgtgcctggctctgagctggatcctggggacaccatcatgtgccagggagagaggcttccggtgtagaccagggtgtagcgtgaaccactaaccactctcctattagtttctctcggctgccgtaacaaatcaccatatatttggtggcttagaatcttacagctctggaggccagaagtccaaagtcagtgtcaccagggtgagaccaaggggtctgcaggccccgggaggaacacgtttcttgcctcctccagcttctgctgacactccctggcttgtggctgcatcgctttatcttcaatgccagcatcctcagctctgtcttcacgtggccttctcctctctctgcgtgtctagtctccctctgtctctctcttataaggactcttgagatggcattcagggcccacctaaataatccaggataatgcccccatctcaagatgcttaatttaatcacatctgcaaagaccctgtttctaatttcttttttttttttttttagatgggctctcgctctgtcgcccaggctggagtacagtggtgaaatctcggctcactgcaacctctgcctcccgggttcaagcaatttgcctgcctcagcctcccaagtagctgggattacaggcatgcatcaccacgcctggctaatttttgtatttttagtagagacagggtttcaccatgttggccaggctggtcttgaactcctgacctcaggtgatctgctctcctcggcctcccaaagtgctgggattacaggcataagccaacatggccagcctgcaaagaccctgtttctaagtgatttccccttctcaggtgccagggattgaaacctggctgttttggagggctattttatttcttggcccaccacaatcctttttttctttctttctttttttttttttttttgagatggagtcttgctctgttgtccaggatggagagcagtggcatgatctcagctcattgcaacctctgcctccccagttcaagcgattctcctgcctcagcctcctgagtagctgtgattacaggtgcccaccaccacgcccagctaattttttgtatttttaatagagacagggtttcactatgttggccaggctggtctcgaactcccgatctctggtgatccacccacctcggcctctcaaaggcaggggattacaggcgtgagccaccgctcctggcccaacctgagtttttataaggtcattctggattcttggtggagaaaattggaaaaggatgagaggaagtggggagagagctgggtggctgtttgtcaccaaagtgagaggtgacagtggctcagacagctgtgacagcagagacagatgcaagaggtttctggaggtgcaactgacaggccatggttcgtgatgggaagatgacaccaaaaaggggcttccagtcagtacatcagccagagccgggaagacggcgagtttggtttggggcacaaatttttaaaaagcctccagggacatccacagaagccttgctagggagctgccccatttggcctggagcctgccctcttcctcttctcccatgtggccgccacccagggcttggccagagcagatctcgggtggcagctgagcctggtgaggacactgggatgctcttgctatttccctgcccctttttctctggggctgtgggtgtaactgttcctcccacaggcaggacagaatccgagatgagaaggtgggacccataaggggcttcccactctggctgtgcctcatggagagggtaacattaaaagatggaggactgagaccgggcgcagtggctcctgtctgtaatcccagaaatttgggaggccaaggtgggaggatcacttgtgcccaggagttggatactagcctgggcaacaggttctacaaacaacaacaacaaaaacaaaaacagctgggcgtggtggctcatgcctgtaatcccagcactttgggaggccaaggtgggcggatcacctgaggtcaagagttcaagaccagcctggccaacatggcaaaaccccatctctactaaaaataaaaataaaataaaaaattagccgggcatggtagtgcacgcctgtaattgcagctactcagaggctggggcagggagaattgcttgaacccaggaggtggaggttgtaatgagccaagattgcgccacggcactccagcctgggcgacagagcaagactccgcctcaaaacaaacaaacaaacaacaacaaaaaaaaaaaaaaaaaaacagccaggtatggtggcacacacctgtagtcccagctactcaggaggctgaggcgggaggatcacctgagcccaggaggtcaagggtgcagtgagccgtgatcatgccactacatgtaacctgggtgacagagcaagacctcatctcaaaaaagaaaaagaaaaagaaaaaggagaaagaggagaaggagctggaagaggagaggaaagagaaagaactgttattttcatctctctcgttgcccaggctggagtgcagaggtgccaccttgccttactgcaacctccacctcccgggctcaggtgatcctcccacttcagcctccccagtagctgggaccacaggcgggcaccatcatgccgggctaatttttttttttttactttttgtagagaaaggatttccccgtgtttcccaggctggtctggaactcctggcctaaagtgatccgcctgcttcagcctaccaaagtgatgggattacaggtgtgagtcgcagtgcctggccttttttcttaaaaaaaaaaacacaacataggagttgcccctttaagacagaaaagaacctcatccacccatcagtaagaggccccaagcttcttgctgtgagtcagggaggcttctgaagggcctcaagccacatcttgctcttgctctggcagaactcccagccctaagctcctgattcccaggctcctgactcctgaggagaaagggtaagaactttccagacacacacacacacacgcacgcacacacacctgaggaaacaaactagctcatcttctcaattaagcttgagttgattttaagcttcaaaaacagtttagttatattacataagtcaggaaacaatggtagggctgaaaaatgatagcttgtttgttttttaaataatgatggctcatgcctgtaatcccagcaccttaggagactgaggaaggaggatcactggagcccaggatttcaagaccagcctgggcaacatagagagacttcatctctaccaaaaaacaaaattagcaggtcatggtggcgtgcacctgtagtcccagctactgaggaggctgaggtgggaggacggcttgaacccaggagggtcgaggctgcagcgagctgtgactgtaccactctagcctgggtgacagagctagaccttgtctcaaaaagaaaaaaaaaaagttttataattgaggtaaatcattcagcattaagtgctggctttctcttaaagagacgacatatccaccaatatcaaaaacagcctcaaagctgggcgtggcggctcacacctgtaatcccagcactttgtggggctgaggtgggtggatcacttgtggtcaggagttcgagaccagcctggccaacatggtaaaaccccatctctactaaaaatacaaaaattagtcgagcgttttagcacatgcctgtaattccagctagttgggaggctgagggaggagaatcacttgaacccgggaggtggaggttgcagtgagcagggatcacatcaatgcactccagcctgggtgacagaccagattctatctcaaaaaaaaaaaaagaaaagaaaaaaaaaatttttttaaaagcagcactgacccatgcagacaacgagtcaagggttttatatgcattaactcgtttgaccatcctagtagcctgtgaggttggttactgccattacctctcattttacagatgaggcaactgaggcacagagaggccaagtaccttggccagggccactgagcatggaagtggcaggaccacgggtctaaccccaaatctgtcttgggaactgtgagactctgaaagaggctacgtgtgcccacggtgttaggagagccagtcttcctatttgttgtccactgcaggcaagagggattttcttctcttctcttttctttctctctttctctctctctctctctctctctttctctttctttttgatacagagtcttgttctgttgcccaggctggggtgcagtagtatgatcttggctcactgcaaactccaccttctgggttcaagcgattctcctgcctcagcctccccagtagctgggactacaggcgcctgccaccacgcctggctaattttttgtatttttagtagagacaaggtctcaccgtgttagccaggatggtctcaatctcctaaccttgtgatccacccgcctcagcctcccaaagtgctgagattacacgtgtgggccaccgcgcccggcccacgcctggctaatttttttatttttagtagagatggggtttcgtcatgttggccaggctggtctcgaactcctgacctcaggtgatccgcccacctcggcctcccaaaatgctggaattacaggtgtgagccaccacgcccggcccaagagggattttataaagtgattttcgacagctcttcctgaacccctgacacagctcaaggacttgtgtggttctgtcctctaggcttttctgtcaagcgagtccctgggcacgtgctagggcactcagcaagcaggacagccaaggccagggagccaccccagtgacagatcactaactcggcggggggcagacagagaactcgtccctgaggtgacatgtgagccccacgtgtgccctgtcagacaaggtggccttgctgagagcaggaggggcaagtgcgtggagcccaaagaggaaaacctgaagaaacaccaggcgctcccagacgagagggtgtggctggtcggggttgggccccgagatggaaacacgttttctgggcctggagtttctatcctgtggggtcatctctaagaaaatgaatcccagataatgaatacaaaattgcccagcctctcctgggtttttttttttttttttttttttgtgagacggagtctccctctgtcacccaggctggagtgcagtggcacgatctcggttcactgcaacctccgcctccctggttcaagcgattcttctgcctcagccccccgagtagctgggactacgggcacgcgccgccatgcccagctaatttttgtatttttagtagagacagagtttcactctgttggctaggatggtcttgaactcctgacctcgtgatccacccacctcagcctcccaaagtgtgtgtttacaggcgtgagccaccaggcccagcctttctcctggggtcttgaaagaggccctgaaggttaagcttcatcagcttcctgtaaaatgtgcccctgaacaggacagggtgttactgagttgccaaatacctattaaaatgttagatacacgcacatacccagaaacatacacacagccggacacacatacacacacacacacacacacacacacacacacacacacacacgaatacactctgagcacagcatttgttatgttttgaataaatgactaactaaacatccattactactactcccaataaaaacacttattgcagctggtcacagtggctcacacctgtaatcccagcacgttgggaggctgaggcgggtggattacctgaggtcaggaggtctagaccagcctggctaacatagcaaaacctcgtttctactaaaaatacaaaaattagccaggcgtggtggctcacacgtgtaatcccagctactcaggaggctgaggcagagttgcttgaacctgggaagtggaggttccagtgagctgagatcatgccactgcactccagcctgggcaacagagatagactccgtctcaaaaaataaaacaaaacaaaccactgtgtgccaggcactgttccaagggcttatttaattttcattacaactcaataaagtagatagtaccatcatccccattgtacagagtagaaaaatgaggcttagagtggtgaagcaatttcctcaaggtcacacagcaggaagtggacgcaggcgctgggcttggagtctgaggtctgcactattctagtagtgaacccactgtctcaggaagcagtgaccacatcaaactgtctcccccacacctggagctcaaattccagaaggggcgacagacaccagagcaatcaataagtaaacaacactgtggattacaaagtgtccacaccagcttccctctggggacaagctgggctctcagagggtgcccctgctcccacctccttcatggagaatgtgagtcactccctccactcagttaggttggctccttgaactttcatctctagcaaacatactttcctctccctttctagttgctaagtataggggaaaacacagcaaaacacagggacctggggcctgtgattttaaggaggcaagcagggaagtcctcccagagaaggtgatgtttgaaaaggaggtgaaagaggtcagggagtgagcacgtgattctgggaacagaggtggatcagacatggcccctctctgcagggagctaccagcctggggatgatggagtagggcagtggggaacatggggtaaacagaggatcccaatccagtctggcgagggctgatggaagcaaatctagggactgcagaagcccccagggatataccaaggcaacctgagggtgtagggtcaggggcttcctggaggaggcgatgccagggagaatcactaaattattattattattattttgagactgagtctagctctgtcacccaggctggagtacagggacacaatcctggctcactgcaacctctgcctcccaggttcaagcgattctcctgcctcagcctcccgagtagctgggactacagatacgtgccaccatgcctggctaatttttttatttttaggagagatggggtttcaccatgttggcctggctggtctcaaactcctgacctcaactgatccactcgcctcagcctcacaaagtgcagggattagaggtgtgagccaccgcgcctggccgagaatcactagattttgatataatccatgagttggagttgggcaggacaaaggacagaaagcagaggtaggagggtggtgctggaagaaggcatggaacgggcaagccgcggcctggtctgtcaggacaggaggagcaggtcacagtggcagaagcacaaagggtaagggagggtccaaggagggaagtggacggctgaagcagaccatgaagaggaggctggaccacaaagcatcccaaatgccaggcagaggggctgcgactctgtcctgagggtgctggggagccacaggcaggctgggagcaggggagagcagggtgagctctgggtgcagaaaggcccctaaggctgggtagaggtgggctgagagggagagactgggagtgagggaggacccgggtgagggtccaggtgagacaatgacaccaagagacaatagggcaagaagggtggggggtggagaactgacagctttgggagaagggaaagagggtgggacagtacccaggtctaatctggtgtttaggaagctggcagggtctgaatcatttatttgttctgaaaaggacatcaacagacacatccagtgagacaggatgtaatgcagggagccctggggcactgcgggaggggaaggcagcaccctctggaaaggacagtagctgattcaacgcggccttcacgcttcccctctgttctctccctgagcacaccagagacatccatgtgccaggctctgtgctgagtgatgctgggaccagagctgagtcaaacgtgggcctgcaccatgggggagacggatccaatcccagacatgccaggcgtggaaggccagggctgggatggagagaagaggcccagggagctgtaggactccaaagatgtgacagtaacgaacagtcagagcagggaggaaaccaagtgttgggtcccaggaccccaagaggaatgtgtctcaaaagggctacaggtgacatccctgtcatgtgctgccagaggcatcattaggacagggggcattgagggagatgggagagcagagtctagagccagacttgcccggggtttcgatcgtaactctgccacttactggctgggagatctgacaggcctcagtttcctcatctatccaatggaattaataatacaaagggtcggccaggcacggtggctcacacctgtaatcccagcactttggggggccgaggcaggcgggtggatcacctgaggtctggagtttgagaccagcctgaccaacatggtgaaaccccatctctactaaaaatacaaaaaattagccaggtgtggtggcacatgcctgtaatcccagctacctgggaggctgaggtaggagaattgcttgaactcgggaggctgaggttgcagtgagccaagactgcgccattgcactccagcctgggcaaaaagagcaaaactccgtctcaaaaaataaaaataaataataaataatacaaagggtactgaaaggactgaatgggttaatctctgcaaaggacttggaacgatgcctgccacgtaagtacccgctaaatgctggctgctatcatcactgacactttcatgctcaagtctggctcctgtaccctcttccccagcccactccctaagcaggcaggggcagtatcagtgtcaactttgtgaccctggttttgcccaccctgaggcctccagggtgccaggccctgcgctaggtaatgctggggacacggaggtaagtccccaggctgatgggaaggacagacatggacagacagtcaccatcttcagtccagttcaggccaagcattgagagaaacgggcctgagagaccgtgtctgattcacctctgtccacaccagcttccctctggggacaacaagccaggcgctgagagcaccctcccccacctctttcatggagaatgtgagctacccccagctcagtcaggttggctccttgaactttcatctctagcaaacacacttctctctccctagctagagcctcctggctcaccctgtggctatggagggtggaaagcagcttctggggccccacaggaccctgtctgactccctctatagcacatttcgggtaatataagagtacaatggtaagtaatgcagcctagtgggtgaaagcagtcagaggaacctggatagaactctcggctctgcccttctctagctgggtgacctctctgtgcctcagtttctccgtgcattaaacagggaccgtgacttcttccagtgggtaagaaatagagaaagcaactcactctgaacagttatcaagagagtgaatccagaacgagggaaaagagaacatggccgtgaccccggagggatcggatgttagaacttcactcttggatttttgccctcaggtgactttgacgtttgggggttaaagcggcagaggtcgggggttacgagaagacccccacccagtgtgcgctcgtggccccggaagcacacggctgcgggactcagggatgtgggagaggggggcccgatcaccttcacggcgtagtcgatgaccctcttgacagctacgagcacgcgcagctccgccatcttcccgccgcagccacttacagggtcagcccgcaccctcagcggctcagtccagaagccccaccacccccgccccccgcgcccctctctgcgcctgcgcgcagcacggtcagccagtcaaccgctgcagagcccgcctccccgacagaggaccaatcgagaggccggaaggaagggaggtgtggcaagcaatgcaaaccaatgggaagcggatctcggggagcgagcgggacctggagagagaaggaaaggcctggcggagagggcagggcagagaactaggggaaaggtcgtgcactggagggaagcgcgcccggagtttatagatcctcccggtcctataaacacttcccggtatccccggatctgctctccctctccagatcccccacttcttcccggcctctccaagtcgcggtactcgtattcccacgcctctgaatcctcgcgcgtcggtctctccactctctccatccccgtgttccctgtcccttccatatccgtatcctcccctgtccgtgtctctacttcacctccatgtcgtccccacagcctctccacaccctctccaaaggcccacgtcccctcctggccccgcccctcccacatgtccctgttcccatcccaatccatggagacttgtgtctccatgtctgtgtctccctgtctccacgttccctatgagttcatgtccttatgtcttccctgagcctctatgcaaccccgtgcctgcgtccccacgacccgcagaaaagcacgcggagccgcagcgctaaaaaaagccgttcctttattctgccccaggcaggctgcagtcacagacacacggggaatccactgatggcgtcggtgctctgcatgatcatgtctgccagcagaaagcagaagcctggggggacgggggtgcggagcagggagaggaaggtgggccctggggcggatggccgggagggccccggggactggggtttggggctccaagggggtctctgccgggtctgcgggagtcgttagtgtgttggggagtccccgagaggtccccggggtttcctgggagggcagctggggagcctctggggtgagggtcttctgggcagtctcctccaccctcttcccgctgtccagtttacccgcgagaattgagaagggtaaggccagccacccagaaaaataggaccaagagaagaagacgttgttcttccacgcattcttcacggtgtagcctatcaaggcggtcagcagcagcagtcctgggccccgcccagccgcaagatgagctagctgggcctggtgggggctgcacccaggccacgccccttcagacccgcccccttctatcagaccacgcctatcgcctctcagcccgcccctggcccaggccccttcctgctcctcccgctctgaactctgtctcgagccccgcccacctctctcggcttcttccagccctgcccctcggatcctggccgagtacctcaagcccctcccctggcgaccaggcccctccatcacccagggcccgcccctgcctgcccgcctggggcggtctgcagtctcaccgccgaggaagaggaaggcgctcgtggtctggccccgcagcgactcgccctcgtcgcaccgaatccgcagtcccatcaccatgcccaccacgccgacacccaccgccagcaccatgcacgccacagtcaccgccagcgtggctggggagagcgggcgcatcagcccccgcgggcgccgccccagtcactacgggttcggccgcaaccggaagctctcccgtctcctgcccccaacccggtgtgtggccaggagccgagctccaccgaccgggagtcaggcgtttggattgagacttggaggtcacatcaggacctgcggttactgccgctaccaggacggggagggggtcggggacaagcccacaagtcgaggggcggggttcgtggcggcctcggccgacaagggacagctgcaactgagcccggggtggaaggggtgggcgtctcgccatgggcccagctgtgtgtcccgagccctgggggtctgaaatgccctctgacatctgggcgggcggagcctcactctggcaggggatgctggagcagatgccgtggttgcattcctgccacaggccactgtggccctcttgttggcgggtccagtagttggtggccgtggagagcaccatgaggacgttggccacgaggctgagcagaatgcccccactctggaggctccgcttcacccccatgccactgaggctgcagccgggggccacaagggcaggatgggcccaggcctttcctaccccgaggcccccagctgaggagcccgcttcctccacactcctcccctggtactcctgcctgaggtccctgcttctggggacctggagacccccctccctcaacaaccctgcctgaggatccacaacctcctccctccagacctcgttccccttactggagaccttgagacttcccctgagaggcctctgagaccttcaccacaggctttgctgtgaggaacctgtcttcccagagacctcccccgacagccgaacgccctttcagcccagcctgttcaatgtcctccccagacacccctccacacaggcccacctaagtgactcacacccagtgccctagggctccttagacacagagcccagagagacggggggagggaggctgggtctctgtgaggccaggggttccagaaccccctcccccagtggctgtttaaagggataatcactccccccaccaccatcgcatacacccccgcagctctcaactgagtgactgcttagattcagatctcagctttgggggccgttacatgataggccgagtccttcttttatcattattatcattattattttttgagatggagtcttgctctgtcacccaggctggagcgcagtggcacgatctcggctcactgcaacctccacctcctgggttcaagcaattcttctgcctcagcctcacaagtagctgggactgcaggcgcacaccaccacatctggctaatttttgtatttttagtagagacggggtttcaccatattggccaggctggtcttggactcctgaccttgtgatctgcctgcctcagcctcccaaagtgctgggattacaggcgtgagccatctctctctcccaggctggagtgcagtggcaccatcacagctcactgcagccttgaactcctgggctcaaggaaacctcctgcctcggcctcctgagtagctgggactacaggcatgtgccaccacacctggctaattttcttaagattttttgtagagatggggtcttgctatgttgcccaatctgatctcaaactcttgggctcaagcgatcctcctaccttggcctcccaaaatgctgacattatggatgtgagccaccactcccagccctttcttagaaacttctctttcccttggccgggtgcgcagtggctcacgcctgtaatcccagcactttaggaggccgaggcgggcagatcacctgaagtcaggggtttgagacaagcctgaccaacatggcaaaaccccgtctctactaaaaatacaaaaattagccaggctagccgggggtgatggcaggtgcctataatcccagctactggggatgcgaggcaggagaatcacttgaacccgggaggtggaggttgcagttagctgagatcgcgccattgcattctagcctgggcgacagagcaagactccatctcaaaaaaaaaaaaaaaaagacaaaattagccaggtatggtggcgcacgcctgtaatcccagctactcaagaggctgagggaggagaattgcttgaacccgggaggcagaggttgcagtgagccaagatcacaccactgcactccagcctgggtgatagaacaagactccgtctcaaaaaaaaaaaacaaccttctcttcccttgacattctaggcaccgcagaagctctccaggtccccagctgtctgactgcagacttctgctcctctgccttctccccttcacttgtaaatctgggtatcccttgaagctccaccctgcactctcttgccaggcaagcctcctcacggccaaagtttcagtgctccttaatgctccatccaaaactccatctccaacccaaggtctctcccctgagcctgactcaagttctcacctgctcctggctgcccctcagggccttaatagtcaaccatattccaactgagcttagtgtcttccaccatattagggatggccctgccatcccatccagttcatcgagccagacccttgggcactgtcctcaccttcttcttgcccttcaccctgaaaagccttgggtccctaagtcctgctcctcctgcccctgaatctgtctggctcattccctcctttcctggtcccaggtcaggcctcatcatgtcccacctattgcattgccaagttcctccctcaccttctggcctcccctccatgtctacaggggggtctttctggcacccagagctgacactgtccctcccctgcccacaatttttctcccaactccccatcatgttcaagagaaagtccagcatgacattagaggccacagcccccacctgcctctccctcttcattttccatcccccgccccccacattctatatcctgaccctaaattaccgatcttcatccccacaagactcctgacttttctgcacgttcatctttgggcccctctgcctggatattacctttccctggcccttaagaagctcctaaatgttctctctccagaaaagtcgtctccatccctccacaatatggtcagtctttttccggcattctccctgcactgggactgctgtctggcctgtattaactgcttctggtctgtaagtgcctcctccccaccaccccacagactgagcccctgctgggcagggcctgggtctgacccgtgccagtgtccccagcatggggaaatgtgcaaagagaactgactgagtgcaaggaagggctgagttctggcaagggggacaaaatcagagagggagagagaaggaaagagagccagctaaagggagaaagacacagggaggaagaaaagtgctggagaaggggagacatagacacgggttggagcctgtgtccacacgggccgggcactcgtactgggcaggagcgccctgcaggctggtcggcctggtgggccctcaccttcccttggtgcccagctcctaccatggagctggcagacagttggcttatgtcttggcagaattaatctcaaaataaccagattccagccaaattttgttgaatgaatgaagaaacaagaggaggggctggggaagggctggaagggcgggcagatgtgggaccagactttcccgaggctccagatgaggcctttggaatacaacgctcaaaactcatcttgccgctcttgccttctgctcacaaggtttcatagccaggacggggaccgccacagtgagcacccaggctcagggcacctggggagccagaaagagtttaagcacttgcccctgccctctgtcctcagggaccccaactggaccctcccaaagctccccagggcagtgggcaggatagtcacctgtacagagcaagaggatagctgagacccagcccaggtagaaggaccaggagaagaaggtctggatctgggggtgtggaggctggtcccaccgctcgctggtgtacaccgccatggccaccaccatggagatggctggggacaaggacaagagagatggctcagctcctcggcaggaattcgctggctcgcgatgccccagtccagtccagagtccttacctgcagcaaaggctgcggtggttgagacaagcgggccgtggcctggggggaacagtgaggggaagcaggacaggaccaggaagctcacggacaccagggcccacagaacagccataatgctgaaggtctgcgtcacgtggatgtagcctgatcgggagaagaccactgagcacccatccccgctggcaacccctctgtaggacacccattccccttacctgatatgatgtccccatgccctgttggccagaggcccgagtgagctgagtgggtgggacccacagcctcaaaccagaaatcggtgctcaaagcaatcaggcagaacatcaggcccagggagccccccagcagggccagggaccggcagagctccatggggataagctcagggcttctgggtcctggaggaggaagaggctgctgatcagactcttgaatctcagagagaaggaggctgtgcacccagactcctgggtccttagagcccaagaaagagagaacagcaagcagttggggcagtgaggggtcctgcgctttgtcacatgaggctggtttggtttcacacagttcccggtagcttttcacataccctcccttcctggattgcacaggcaacgtcctccctcccctccctggggtccagttccccgcttagtgtgtgatgggggagggcactgagggtgtcagatcatcagtggtttgggcggtggtttagtacttgcctctgtcacagattctacaactcccacccatggaaccttcaacaccaagtcggggcttcctggaagaggtgagagagagaggcttgggggccctgaggtgggaggaagccaatcaggctagggtgtacattaagggggagggcagatgtggctggaggggacagctggggatgtgtcatgctttcctgtgggttatgcagtcttccattctgggagaggaagtccccaagtctagggtctctactgaaggaggggacttgggagttagaactcctggggcttaaggaggaaggagctgggggcctgaactccaggtcctgagggaggaagaggcgggcaggagctcagaatcctgggccccagtttggagcatatgccaagggcaggcaaacagcagagaatcacaattctgaaaggtttgcagagagtcagacatacccacatcctcatctgattaatgagttcagtggcatccctgcttgggtgggggctccagcctggtggcctttatcaccaggatcggggggcctagggggtgttgggggacataaggattttggtttagggttctccagccccccaaacgctagcctcttccatccacaccatcaggtcctggcaacacctcatctacgagcaggtataaggtgacggtaccacagcccaggtagaaggcccaggaaaacttgacctctgtgaaacggtgatatggttagggtttgtgtccctacccaaatcgcaccttgaattgtgtccccataatcctcacgtgtctaggtagagaccaggtggaggtaattgaatcatggggccggcttcccccatgctgttcttgtgatagtgagtgagttttcacaagatatggtgtttttttaaggggctcttcctgccttcgcttggccttcttcctgccactctgtgaagacagtggcttgcttccccttcaccttccaccatgattgtaagtttcctgaggcctccccagccatgctgaactgtgaatcaaataaacctctttcctttataaattacccagtctcaggcatttgttgttgttgttgttgttgtttgagacagagtctcactcttgtcactcaggctggagggcagtggcaaaatctcggctcactgcaatctccacctcccaggttcaagcagttctcctgcttcagcctcccaagtagctgggattacaggtgcccgccaccacacccagctaatttttgtatttttagtagatttcaggtttagtagattttcgggttttcaccatgttggacaggctggtctttaactcctgacctcaggtgatctgcccaccttggcctcccaaagtgttgggattacaggtgtgagccaccacgcccggccaggcagttatttatagcagtgtgagaatagactaatacatagggagtagtctggaagaggacctctgtcttggagatgaactggtccagcagtcccaggacagctggcaaatgtggagaatgggaaatgacctggaagactggttcctctcctttattggagagactcagatcggcagcccccatccttcactcagatctgcaccactctgagaacacatttatgagcacaggctcccagaggtggcagaggccatgagcaggccaggtctccggaaaacctgccatggtgtgcagtgagtagcaggtcagagcacacagcctatctatctgtgaccctgaccccctcccaaacccaaagccatccttaaccccaaacccaactccatccccaaactcagtatcaagcccagttccaaccacaaattcaacccatccctatccccaaagttaaccctattcccattcctgaacacaactccatacccaatcccatccctattcgtaatctccaccctagctccaacccccatcctcaaatagaactccattctcagtcccaactacacactcaaccccatcccccgattcgcccccatccccaaacctaacgtcattctaattcccaaactcaacatcatccttattcccagttccaacccttatacccttcccaccctcaaatctaactccattctcattctgaaaccccaccctatctccaaaccaaacccctctccattattaaccccagcccctactccaaacccaaccccatcctcttcctgaaacttgaccctattctcattcccatcccaaccctttttttttttttgagatggagtctcactctgtcacccaggctggagtacagtggcatgatcttggctcactgcaacctccgcctcctgggtttaagtgattcctgtgcctcagcctcctgagtagctggggttatggttgtacgccaccacaccaggctaattttttttttttttttgtatttttagtagaaatggggttttgccatgttggccaggctggtcttgaactcctgacctcaggtgatccacctgcctcagcctcccacagtgctgagattacaggagtgagccactgcgcccagccactgtcttttcattcttctctgcaacctctataattcatacctaactccgaccattttcattctcctttcacctccaggtccaagcctgtaacctcatttctcatctccccaagtgggtcccactaccaccaccatcacacccatgcatgcatgcatacacagaggtgacctgtacctggctccagtgagtctctgcacatgtaggtatcacaggctgatcacaggcccaggccctctgacagacaccacaagccagtaagagcgggtgagtgaaggtcatcttttttttttttttttttttttttttttgagacgcagtttcacttttgttgctcaggctggagtgcaatggcatgatcggggctcacagcaacctctgcctcccaggttcaagagatcctcctgcctcagcctcctaagtaactaggattacaggcatgcgccaccatgcccggctgactttctatttttagtagagacggggtttctccacgttggtcaggctggtctcgaactcctgacctcaggtgatccacctgcttcagcctcccaaagtgctggaattacaggcgtgagtgaccgcacccagccagccaagaccatctcttaagagcacaaaggcaaggcagctggggccttgaagacagaattgctcgcaggatctccagcagctttctcaaccagatgtggtctgtggttgccagaggaaaaccccaggcctccttctgaagcttttcctgagagctctgtgaaaggaaaatcttggggccccaaaattactgagctaaaggggaaagtcaggctgggaacagctcagggcaaacctgcctctcattctattcaaagtcatccctctgctcactgagatcgatgcatatctgattgcctcctttggaaaggcttatcagaaactcaaaagaggccatgcctgtaatcccagcactttaggaggcctaagcaggtggatcacctgaggttatgagttcaaaaccagcctggccaacatggtgaaaccccatctctactaaaaatacaaaaattagccgggcatggtggtgcacgcctgtagtctcagactcaggagactgaggtaggagaatcacttgaacccaggaggtggaggttgcagtaagccgagattgtgccactgcactctagcctgggcaacagagttagactccatctaggaaaaaagaaactcaaagaatgcaacaatttgtctctcacctacctgtaacgtggaatccccctccctgctttgagttgtccccaccttcctggatgcaccaatgtacttcttacatctattgattgatatgtcatgtctccctaaaatgtatagaaccaagctgtgccccgaccaccttgggcacatgtcgtcaggacatcctgaggctgtgtcacgggcgcatgtcctcaactttggcaaaataaactttctattgttcttttttttgagatggaatctcgctctgttgcccaggctggagtgcagtggcacgatctcggctcactgcaagctccgcctcccgggttcacgccattctcctgcctcagcctcctgagtagctgtgactacatggcaaaataaactttctaaattaactgagacctgtctcagattttcggggttcacagctcacgtcgcctgcttggccacttggttctcttaggtctctgtcagtcttgtctaagcactgtcagtttttttgaatcacccaggtctcttccaactttctccagccccttccaacctctcccgggcttgaaagctcctcagtagcccccatctgccacggaagaccccaaaaaattagctgggagtggtggcgtgcacctgtaattccagctactcgggaggctgaggcaggagaatcgcttgaacccgggagtcagaagttgcagtgagccaagatcgcaccaccgtactccagcctgggtgacagagtgagactccatctcaaaaaaaataaaataaaataaaatttaaaaagactaatcctcaattaacctacgttctattaaagaaatgaatgctaatggtaaacagttattatggaaggcatcatcatttctattgaggtgcactctagtcataatatttaatggctattataatgataaaaagatattaaatctcagtatcattagagtacatttcaataaataatactttatgtaagtcaataaacagcacttactttatgtaagtcagttggcctgaataaagatttattgttcaacaaatgttcttttgagtgattaccatgtgccaggtgctgtctttgaggatttacaggaaaccaaaagcagacacaggccagctggggtggctcacgcatgtgatcccagcacttcgggaggccaaggtgggaggatcacttgagaccagtagacagagaccagtctaggcaacataaggagaccccatctctacaaaaaattaaaaaattacccaggcatagtgggtggtgcatgcctgtagtcttagctgctcaggaggctgaggtgggaggctcagttgagcctgggaggtggaggctgcagtgagctgtgatcacgccactgcattgtagcctgggcaagagtgagaccctgtctcaaaaaaaaaaaaaaaaaaaaaaagccaacattgaatcccaaagttgttggcttgagtagctggataaaaatggggttgtttggccgggcgtggtggctcacacctgtaatcccagcactttgggaggccgaggcgggcggatcacgaggtcaggagtttgagactagcctggccaacatggtgaaaccccgtctccactaaaaatacaaaaattagctgggcgtggtggcagacgcctgtaatcccagctacttgggaggctgaggcaggagaatcacttgaacccaggaggggaggcggaggttgcagtgagccgagattgcaccactgcactccagcctgggcaacagggcgagactccatctcaaaaaaacaaataagtaaaataaaaaatggggttgccatttcctaagatggggaagaccatgggaggaacacataggctgtgtgtgagatcaggaacttatttttggatatgtgagattggagatgcctcttcttttcaagtgggaatgttgagtaagtaagttgagcaggtaagttggagtcctgagtctggagtcataattatatcattattattgctagagtaagcccctataaatatgattactagaataagtctcggcaaatatttctatttaaataggcctcaataaattattagagaaatcttcaattgtcattattattagagaaaacctctataaatacagtatttttatttgaggaggccccagtaaatattattttagggaataagcctctataaacataacatttattagcatagctgtagtaaatagtctgattagaatcagccttatgaaatagtcttatgatagacatcagtaaatctcatggcagttagcaaccatttattttctttttctttttcttttttattttgagacatagtcttactctcgctcaggctggagtgcagtggtgctatcacagctcactgcaacctccgtctcctcggactccagcgaccctcccacctcagcctcctgagtagctgggacaggcacacaccaacatgcccagctaatttttttttttttttttttttttgtagagatggggttttctcatgttgcctgggggactcctgggcttgagcaatccacctgccttggttttccaaagtgctgggattaccggtgtgagacaccacacccagccagcatcaattaatagaatgaattactaatgagtgaatgaagagaagatcacggtcatgaatggtgtgtgaagagcaggtgccggaggtaaggctcagggttctggtgtttcctttgaagggacgcatcaggggaggagagaggaggctggggagagccaactggaggcggggtgggcagggagttttttcagagatcttttcatttgtccgattatcctacacatccatatcctggaagttgaactgtggtgagctcctggacacggactgttgattcatctctgttcccctccgtgcagaaactgagaaggtcaggcctccataatacagcacccctgggccgggtgcagtggctcacgcctgtaatcccagcactttgggaggcagaggtgggtggatcatctgaagtcaggaattcgagaccagcctggccaacatggtgaaaccccatctctactaaaaatacaaaaagtaaccaggagtggtagtgggcccctgtaatcccagctacttgggaagctgaggcaggaaaatcacttgaacccaggaggcagaggttgcggtgagctgagatcgcaccattgcaccccagcctgggcaacaaaggcgaaactccgtctcaaaacaatgaagacaacaaccacaagaaaaacacacaaaaaagcacccctgcccacacccaccacccttacagctgtttctccccatcctagtccctcaagtattaacactttagtagtttcacatcagttttattaggccccagaaagttgctctaatggatagtccatttttctaacaacctgccaggcagacggggacttgagtcttctcagctccctcccatgggccctattcttcctccttccagcctaggaccaggagtcagcctccccccacaaacccacagtccagaactgagccccctcattcccctaggaaccaggatttcaggcctctagaccctcctcctcctcttcagtggcctcactttaacttccagatgaagttgggggacacatttgggctcagcggggtgtagacaggcgccggcattcatgcacccggtaggcgcacatgtagaaaatccctgcatgagaagaagttcaaattcaccccctcaaacctcccccagctccatttccaccccaagagagcccaacaccctactctctttctccctgggtatccccgaccccagactccataggcctggagtcttcctcctgacccagtgctgtgggactcatgtgggacaccctgtcatcttccactctatctgctgcccactctgccccaggcactgaccttcccaccccttgcccccagtacctgcgaagaacgtcatgagcactgccacccagcccaggatgtaggaccaggaaaagcgccagtccccaaagcggcggcccaggaagctgacggtgactccagtgtagatggccaaggccaacacgacgaaaagggctggggagagagggcgggaggatgcaggtgggactaaggctgggtgtgattttggaggtgggcagagagctgatgatgggggtgggaactaagattggggaaaggggtggaaatgggttgggggtggggataggagtgaggataggggttgagttgaaattaggggtaaagatgattgggggataggtttgggatggggttggacacgcttgtgttttataatgtaattggccattgtctctggttcctgggagggagaaacaatatttggaacttcctgagtaataggagggtctttgttattcttgagcctcttgggcccaacctgagtttatggtaatgagatgagatgactcagggttgggtgtggttgtcagaaaaaccaaccaggtcaggcacagtgactcatgcgtgtcatcccaacactttgggaggctgagtagggtggatcacttgaggtcaggagatcaagatcagcctggtcaacatggtgaaaccccgtctctactaaaaatacaataaaaaaaaattagctgggtgtggtggtgggtgcctgtaatcccagctactcaggaggctgaggcaggagaatcacttgaacccgggaggggaggtggaggttgcagtgagctgagatcgagccactacactccagcctgggtgacagagtgagactccatctcaaaaaaggagaacaaaaaagaaagaaagaaagaccgaccatgatatgttgaggctctgaaccacttgatatcagggaagaaaggaagttggaaactgcattccatcaatgaccaacgattcaatcagtcatgcctattttacaagactccaataaaacctctggacactgaagctcagtggcgctccctattggtgaaaacatctgtgtgctgggagggtgatccctggctccacaggaagaaggcttggaagctctgcattttgggctctcctagactctgccctctgtgtctcttcatttgcttggacctgagttgtgtcctctataaggaaactataactgtaagtatagcactttcctgcattctatgagttattccagcaatttttgttgttgttattgttgttgttgtttttgttgagacagagtctcgctctgtcgcccaggctggagtgcagtggcacaatcccagctcactgcaagctccgcctcctgagttcatgccattctcctgcctcagcctcccaagtagctgggaccacaggcgcccgacaccacgcctggctaattttgttttgtatttttagtagagatggggtttcgccatgttggccaggctagtctcaaactcctgacctagtgatccacctgcctcggcctcccaaagtgctggaattacgggcgtgagccatcgcacccggcctccagcaaatttttgaatctgagtgggtcttgggaacctcctagtttgtagccagtggatcaaaagcatgggtggcccaggcaccctgcttgcagcttgtagctgaggtggaagcagtcttgctagggactgtggtcttaacctgtggagtcaaacacaaattttaggtgattcatgccagaactgaactgtagtacaccagctagtgtcagaatagactggaactagaaatagtcatgaggttggttttgagtgtggggatgggattagggtggggtggggttgagtgtgaggaggagtaaggggtgagaatggtgttgaggggtggggacagattggggtttgagatgagagcgaggagaggggtagggagagggtgggcttactcacttgaggaaaaaaacatgatgccagcagagaagggccgggagatgcgggagaaggtaggctgatgagcgaaggccatgatgcccatgatgatgccggagatggcgcatagggcagacaggatcatgaaggcccgggtggcattccagtatgctgtgggagcaccccatggtcattcccacacctcccctgctctaagtgagagatgctgctacctctgagatgaaaatgccttgcccctttccatatccctaacccagctcatccttcccttctttgcaaatgccctcttcttcacctggcaaactcctactcatcctccaaagcacagctcccgtgacccatcctctaggaagcatctccccacccctcagtcatcatcttcacccacggctaagggttgtgactctctttgtctgtctccccctccagcctgattgctccttgaagacaggcggtgggttggttctgtgtcataaacacccccaccacacatttggtttgcattctggccttgggaaatgtttgttgaatgaatgaatgaatgaatgctgattccttatattttcctactaattactattctctctcacatttctttttttttcttttctttttttttttttttttttttttttgagaccgagtcttcctctgccacccaggctgaagtgctgtggcacaatctcagctcactgcagcctccacctctgaggttcaaacgattctccttcctcagggtcccgagtagctgggactacaggtgcgcaccaccatgcccggataatttttgtatttttagtagagacggcattttgccatgttggccaggctggtctcaaactcctggccccaagtgatccacctgccttggcctcccaaagtgctgagattacaggtgtgagccactgcgcccagcctactctttcatttattttatactacttgcttatatctgaaaatgtcctatttacttgtttttaacttatttataatgtctgtctctcctcagtaaatccttagctctcaaggacaagcaccttgctttctcattcaccactgtgtccccagcacctacacctggtgcataataggtgcccaataaatgcgtgaaatgaattaatgttgagcaccggggccattcttctcttgtgctttgcccagggatggcccctcaggaaagataataataatctcttcatcctttagcaacggctaactatatgccaggctcgctacccaggtgtgatgttgtttattcctccagagccctactctataagtaccatttttatgcttctttttcaagtgaagaaatggaggcccagagaggtaaagtgacttgcccgaagtctcataattagaaacagggctggagtcagaatccaagctccaaggcccacgctcctaactgcttggctattctgtctgctggagcacctgggaaatggtgcacctcaaaccttgcatcttgccattgaaaagtaaaaagtctaggatctttgtaaaacccagtcttctgccttgtagaagcctcggtgagagaaattcctggctgtttctccatggattttatgggttatgcctttctgtcccccgcctcaaatgtttatgttgaaattgtaactagtgccttagaatggtaacttatttggcaatagagtctttgcaaatataattagttaagacgagatcatgctagagtagggtggggctctaatccaaagactgggctgggtgtggtggctcctgcccagtgtaatcccagcactttgggaagccaaggcaggtggatcacctgaggtcaggagtttgagaccagcctagccaaaatggagaaaccctgtctctactaaaaatacaaaaattagccaggcttggtggtgggcacctgtaatcccagctactcaggaggctgaggcaggagaatcacttgaacccgggaggtggaggttgcagtgagccaagatcattccactgccctccagcctgggtggcagagcgagactccaactcaaaaacaaaacaaaacataaaacaaagactgccgtccttataaaaagaggaatctggacacagacatgcttttaggaaaaatgccatgtgtgaggaaggtagaaattggggtgatgcatctccaaaccaagaaacaccaaagattcccagaaaatcaccagaagccagggagggagggacatggaacagattctccctcacagccctcagaaggaactgattttgcccacatcttcatctcggcctccagaactgtgagacaacacgtttctgttgttcaagccacccagtctgtggggcttttttatggcatccctagcacactaattcaggctggtcacagcggctcaggcctggaatcccagcactttgggaggccgaggcaggaggattgcttgaggccaggagggtttctttttgattatttattttatcttattattattttttgagacagggtcttgctctgtcacccaggctggagtgcagtggctctatcttagctcactgcagccttaaacttctgggctcaagtgatcctcccacttcagccttctgagcagctggggccacgggagcacaccaccacgcccagctaattttttattttttgttgagatggggtctccttacgttgcacaggctggtctcaaacacctaggctcaagtgatcctcctacctcagcctcccgaagtgctgggattccaggctgagccaccacgtccatctgaagccgggagtttgaaacaagcctgggcaatacagtgagatgctgtctctacaaaaatcaaatcaaatgaaataatgaggccaagttcggtggctcatgcctataatcccagcactttgggaggccgaggcgggtggatcacctgaggtcaggagttcgagaccagcctggccaacatggtcaaatcctgtctctactaaaatacaaaaattagccaggcatggttttgggcgcctgtaatcccagctactcgggaggctgaggcaaggagaattgcttgaacccaggaggcagaggttacagtgagccgagatagtgccattgcactctggcaggggtgacagagcgagactctgtctgaaacaaaacaaaacaaaacaaaaacaaacaaacgaaaaaacgaaagaccttcaccaaggctccctgtctcctgcatccctggcagagataagacagagaggtggctcagggctgtccctcggggaattcccagcccgaagcaggagaaatgtagaagtgtcacaaatgagacagccagaaaggagaaggatgtgtggagtcaggcagagcggactctgaagctgatggcccaaggcaagtcttttcacttctccctgcctcagtctacctctccagcaaacaggcatcgtcctgcctctctctcagggctggctccgggagagatgagtgggcgaagtctcccatgcctgtcacgtccggcactcagtgacgcttagctcttcttctcagctactcaagaggatgtttgaattttgagatcaaatctcatgtctcactcttacatacaattgaactgcccgtagtgttgttggggatggaagtgagtttatccatgtaaagtgcttagaatagcacatagggcatagtaagcactcaatcaatgccagttattattattactgttactagtagtaatacacaatatattatatattattaattaatttttatttattttttagacagagtcttcgtctgttgtccaggctggagtgcagtggtgccatctgggcccactgcagtctccgcctcccaggttcaagcgattttcctgcctcagcctcctgagtagctgggattacaggtgctcaccaccatgcctggctaatttttgtatttttagtagagaccgggtttcaccttttttgccaggctaatcttgaactcctgacctcaggtgatccgcccacctcagcctcccgaagtgctgggattacagacgtgagccaccacgcctggccaaatttattaatatgttatataataagtgtgcaatataatatactctacattattaatttattatataatatattgtataatatatacattattaatttattatataatgtcatgacatatactatttattagataatgaatgtgtaatataatggattctacatcatatataatatattacatgtgcattacttatataatatgtagcatattatatacaatatattatgtattagtaatttattatataatagaggtgcatgtataatacactatactgtatattattgtctatatgtagttatatataatacatcataaattatatgtaataatataaattgcatatattacacataatatagtatacattaacttaatatattatagatgctatgcagcaagcaatatactatatatctctatgtatctctctatctatggcctggcacattataagtaggcaaaaatactttatgctactttatgcagtatttagcaaattcagtatccaccagtacctaacatagttcttggtccatagtacatatttagaaaatgctgtttcgtgacactagccccaattgctgtgcatgacacctctgaagcgtcaggaaatgccacctctcccaacttaaccttcaaaccagcaccccgtgaaactgcagctagaaaacaaccctgtagtcccagttctgccccctccatgctgagtgaccttgggttgctccctttccctctttgagccgcagagttctccatctggaatacaggtgtccttgggccccgaggtccgccctgctctttccccaggcgcggcctggaccctggccggggggctcaccgatgctgtctgtctgcaggtagcacttgttgcccaggcagtaccgccacaggccctggtgggcgaaggaccctgacagccggtactgcatccagtggtctgttgccatggccaccaccaggaggatggtccccacccaggcacagaacaggccaccacccatgaagctgtacatggtgatctgtggggaaggggagagatgggattgggagctgaattcccgggacttgaagggaggaactggggggagagagggctcaggagtgggatgccaagtgcttgggagaaggagatggagacctagacgcctgggtcctgggcgaggaggggactggagcccggactcctgggtctgagggaggaggatggtagggatcctggaaagacaacagggagagcggggctgggttctgggaagaaaaggccgggggcctggacttccaggttctgagcaaggaataggctggaggcctagcttcctgagtcctaggtgagaaggggcccaggagcctggattcctgggtggtgggtaaggaaggggctaggggctagggggtaggacaccaggtcctgggagaagaaggagctgggaccctagactcctgggacttggggaagagggggctacaggtctcacgcctggtgcctacctgagtggcagagcctgcccgagccctccttctgccacggcccctctgtgcagactgagctgagcctggtcactggcctctttgcccccttaggttccccaaatcccttaagcctccctacacaatggtcccactacccagcagcttccagcaggcagaaatgcagcggtggcagaggcctcaaatggaattcgctgaagcaggcatccagggggctccccccacccactcactgacctctgtgaccctccccggaacccaataccttgtcgccagccttgctcaaagcaaccctggctttgtccgagctgtgtaagcacgcacacacgcacacacacacacacacacgggcgcgcgcacacacgcaagattcagggagagtcatgcgtttattgttcaaccagggctttctacctgaagagcaggcagtggggtggggagtcacaggtgtctgggtatgtggggccaatgcggttctttgtggggatggacacagggctgtggctgaggttgaggatggagctctttggggctgtagattcagaggacattaaagatgggctgaggtacacaggcaatgaggagaaaggggttggtaaagagggtgggttagggttgaggcgcagaagtggagctgggactggtgacagggatgggaatgaatgggtttgggaacagggtattgagagtggggaagagagaggcaggtaggagtggctttgggattagggagaggatagggaatggggttggaggagccctgggggttgagaatgaggtaaggattgtggttgtggttggggatggcattgggaatggggttgaggccatcaaggagacaggtttgggtacgaggtttaggattttcttctcacttgggattcaggtgacttaggtcaggttcaccaagtgcctcacaggagctactcctgggattgtggttttggggagaggggaggatggaagatgtttcttggggttcttctgacagggctgagatcactctgggccccaggaaaaccctcctgggtgactgcaatctcaggtgcctgaccctccaaggtcctagtactctgtctcccagtcctcagcagccagtggtgtttccaggggtggctctggacctcgagcttctttcttcccatcctgggcaggcagtgttggtggtgatggcagtgtcattggtggggtcctggggccagccccagggccccccgcccggcccctctctggctgctcagctctcccaaggccccgtcgatgcaggcctcggccccagcctggcctgtgcctgacttcccagcctccgcgtcccctgggaggcctcctaactgcccccggctgggagtggcctgcctgggagcagcaggggcaagagggcaaggcctgttggaaggtgtaggcccccagcagggcgctgtgcaggaggcaggagagggtgtccaggcgtatgggcacggtgacagaggccacgctctccgggagccccaggtgggtggggtctgtggagttcaggagcaagggtggaggggctgggagaggcgcagggggccatggctcggtcccagatgacggcagggacaggttgttcctagaacaacaaaaagacaggtcagtggggctcagcgtctccgtactttcttgtttctcgctgccaggctgtctctgcacctctgcagaaggcagccatctctccatcctcagtgcccacctgtgacttcctcccccgcttctctctttttgtttctaacccgggtctctctaaagaaacagacagctctgccatgaacttcggcaccagacagaactcagttccaattcctggtggcctcgcttttggtggtgtatctttggacaaatcattttcctattccgaaccttaatttgtttatagtcacagatggctttggatggtatcaaaggtgcgtatgacagcgctgggtctggtaagtgctaaaacagtggacagctacgatttctccagccttctggggatccctggagtcttcacatttcttggtttattcttggaaatttctgttcgatgagtatctgtttctagctcttttttttttttgagatggggtttcactcttgttgcccagactggagtgcaatggcgctaacttggctcaacgcaacctctgcctctcgggttcaagcgattctcctgcctcagcctgtcgagtacctgggattacaggcacgcaccaccacgcccgtctaattttgtatttttaggagagacagatttctccatgttggtcaggctggtctcgaactcccgacctcatgtgatccacccgcctcggcctcccaaagtgctgggattacaggcataagccactgcacccggcctccgcctgtttctaagtatctcgctcaactctcaccaagatcttctaagattctgtacctatgtgatgatacctgagccttttttgtttttcctgattctctatgcaggtctgttcagcgcgccctttctctctcgttttctctgtcccctcctctctctgggtctctgtccccctctcaggaggtctttgtttgtctcacccttcaggcccagccccgtcctttggttgttccatctccactggggccctcttacgtatcttctagcaacttcgcctccgagatccttcgggggcccgggaaggttggggaggggccgaggccgagagaggcggggcttggccgggtcagaaatggggcgtggctcgcggagttatccgggatcccaaaagaaagagctcaggcggggacctggatctagttccccaagatcacttacttaaggcctccagcaccctgtagcccctcctccctcagacccaggagtccagatccccagctcctcctcgctcagacccaggagtccagatccccagctcttcctccctcagacccaggagtccagatccccagctcctccctaagacccaagagtctagatccccagccccctcctccctcagacccggaagtctagggccccagcccctcctccctcagacccgggagtccagatccccagctcttcctccctcagacccgggagttcagatccccagttcctcctccctaagacctaggagtccagatccccagccccctcctccctcagacccggaagtctagggtcctagccactcctccttcagacccgggagtccaggctccagcccctccttcttcagaccccgtactctggttccccagcccccttcctctctcagattcagtagtcccgggacccctgcccccttctctctctctctctgtctttctctctctttattcctgccatatcctcaagacagattctttaggactcaagggacgttttaggtagggaaatgtggacactccctagggcagagggcgtggtagatggtctggaggtcttagccattctaggcgctgggttctactaggtgccgtgtctctaacttgctttgttactttaggtgcttctactctctatgccctagtttctccatctgagaaatggggctaatattactgtccaggttcttgtgatattacttgtgtattagtagacacagaatctggaccacaattaggctgaacacatgagatttacttattgttattgctggtggttgtgacagtgttttgctgagaagcaatcgtcattattacatgcattcatttaagaaatattcaatgcctgctatgatttgggctccaggctgcacacgggacagaatagacatggcccctactctcaggaaacttgcatgcttgtaagggagacagacgagacatacatagcatatattctgtaagaatatgtacctgaagatgtcaaatcagggcaagaggatatagagtcaccgaggtagggagatagagcagataacgtggttaggggcctggcccggtggctcacgcctgtaatcccagcattttgggaggccgaggtggacggatcacttgaggtcaagagtttgagaccagcctggccaagatggtgaaaccccatctgtactaaaaatacaaaaattagctgggcgtggtggcaggcacctgtaatcccagctattcgagaggctgaggcaggagaatcgcttgaacctgggaggcagaggttgcagtgagctgagatcgtgccgctgcactccagcctgggcaacagagtgagaccctgtctcaaaaataaataaaataaataaataaataaataaaaatacaaaaattagccaggcatggtggggcatgcctgtagtcccagctacttgggaggctgaggcaggagaatcacttgagcccaggaggcggaggctgcagtgagctgagatggcaccattgcactctagtctgggctacagagtgaaacttcatctcaaaaaaaaaaaaaaaaaaaaagaataaaaaattaagtagataagatggttagaaaaggctgttatgggaaggtactggaagactggaagttgaatattcctggggagggaacagcttctgaaagtaaaacaaatgtagtgattcagggactggaaaataatcagctaagaggagtggcataggtatttatatttttaaataaatgctttatgttgcaatactttttgcgtgtgttttttttgagacagggtccccctctgtcacccaggctggagtgcagtggtgtgatcatggctcactgcagcctcaacctcctgggcccaaaccatcctcctacctcagcctcccaagtagctgggaccacaggcacacactaccacacggggtgccttattttgtagagacagggtctcagaatgttgtccaggctggtctcaaactcctgggttcaagagatcctcctgttttggcctcccaaagtaccaagagattacagtcatgagccaccatgcttggcctggaatacttttatacttagagaaaagttacaaagataatacagagagttctcatttactccagacaggagttcccctaatgttgccatcttacattgtcatgtaatgtacatggtacattagtcacaactaagaaactgacaggactattaggtaaactgcaggctttatttggattttaccagtttttacactaatgtcctttgtttctggtcctggatccaatctggactaccacattggatttagtcatcctctctcgttagtcttctctaatctgcagcactctctaagtctttccttgtttttcacaaccttgagagttgggggagttctaaattattttgtaaaatgaaggtcttttttttttttttgagacagggtctccctctgtcacctaggctggagtgcagtggtgctatctcagtgcactgcaacctccacctcccgggttcaagcgattctcctgcctcagccccctgagtagctgggattacaggcgcctgccaccacgccccgctaatttttgtatttttagtaaagatggggctttactatgttggcaagactggagatctattttaatgaataatatgaactaatttaatccacattttaaaaaattatgtatttattttaatagagaagaggtctctctatgttggccagttggtgttaaactcctggcctcaagcaatcttcccacctcggccttccaaagtgctaggattacagggtattttaaaatttttatttatttatttatttatttatttatttatttatttatttaagacagtcttgttctgtcgcccaggctggagtgcaatggcacgatctccgcccactgcaacctccgcctcctgggttcgagcgattctcctggctcagcctcccaagtagctgggattacaggcatgtgccaccatgtccatgtccagctaatttttgtatttttagtagagatggggtttccccatgttggccaggctggtctcgaactcctggccccacgtaatcctcctaccttgagtgctgggattactgggataggcccccgtgcctggcccacaacattgcattttaaggaggagaagtcccaggcaacaggatcgccctatgctggacgatgttagtggcactgagtggccggaataagatttttgccaagagatctggcttgcttttctttcctggagactgatgagaacccagatcttcagatttcaagtctgggtctatccattcggttactttaaatcccagaggcagatggcgctcactgctcaagtctagcgtcatgggattgttctagcttgttcttttattgcttctcctattactaagatcaggatctgacgccatttggaaaccagggtctgaccgcttaccacgtacctcgccctttaaggctttttctgtcccgtcccccgtgcccctgcggcgctaggagactggaggcgggaccttgtgtcgctaaggaaatgccctttactcagcttccaaaattgacaggctagttctgaaaactggccaaccaacttctgcttaaggggaagcgagacttccgatttgtaggggaacgcagcggcgattggttagagtcccgcccacttgttaagcgtcgcgagccactattctcggctctgattggccagagaactcgcgccgcttttgaatccccaccctgcggaccccgcgcgcctcgccttctccctctggttggcgagcgcctttctgcgccttcaggcatttttgctgaggcttttgtctgcgcatgtgcgggtaggttccggtagcatccgggagacccggcccaggcctggagatgctgagcggagcttggagggagagaggggactgggttgttgaggggagaatccctctcggcatctccttggcccactggggagccccattgccccatccaccgcttagaaccagacccttcctttcactctccactccctatccctaccggctttagaccttcaaagttccaagattcgaccttcggggtctccccatttcgtaggggcttacagatttcctaaaatccccctcctccccgaacccccttccgtccctggagattctggggtccctgctctttcccattcattccaccccatctacttgggacccttccaagggcaaggggggcctctcagtgcctctcctaccctcatgtcctttctcctcttttaggtccaggaggtcatctttgcctcccttccttgaaatctccccagatttagaggccctcacccagcttctcccctctcagccctgtcgaggtgtcaaggttcggggatcacctttgttgttgttattgtcgaggcgtcaaggttcgggtgtcacctttgttgttgtgtgtttttttttttttgaaactgagtctcgctctgtcgcccaggctggagtgcagtgatgcgatctcggctcactgcaacctccgcctcccgagttcaagcgagcctcctgcctcagcctcccgagtagctgggattacaggtgcctgccaccaggactggctaattattgtattttcagtagagacggggtttcaccacgttggccaggctggtctcaaactcctgacctcaagtgatccacccgccttggcctcccaaattgctgggattacaggcgtgaaccacagcgcccggcctaagccctagctgttcattgccacaatgagaggaagtacaggaaggtgttgagatcatgggcgtggagtccaactgacatgcttgactgatgtcacatactgctctgcccctgaaaagctgagtcaccttgggtaatttgcttagcctctctgagcttcagtttcactcgggagctggccaagaacacttgtctcagagttgctatgacattcgaacatggcagtgtacgtaaagggctcggcatggagcttgttctcattaagccccatggcacgtgggcatctatgctttttttttttttttttttgtagaaaaaagtttatttgctggttattgtttgatccttgaaatacaattcctcactggtgatactagtataaaatggtggttatgaatccatgctagcccaacgaaaactaatttaacaaattggtaaaaaaaaaaaaagaagtcgtttttgaatctctattaagatttgaactaatacataagcaaatctgtgctaaaactggaactgctgggccaggcgcggtggctcacgcctgtaatcccagcactttggaaggccaaggtgggtggatcacgaggtcaggagttcgagaccagcctcaccaacatggtgaaaccccgtctctactaaaaatcagctactggggaggctgaggcaggataatcacttgaacccaagaggcggaggttgcagtgagctgagatcgcgccattgcactccagccagggggacagagcaagactccatctcaaaacaaaacaaaacaaaaaactggaactgccttctcacactacatataatttgccttccagcttcaaccatctgatgttgaaatctaaagcactctcatgagttaaatgtccctgacaaaccatgtagatggacaaaccagattggtggtctttaactgctggtgatagaaaaaggctgcagtttagtacttaaacctgcagttagtggtcaactttccatctaggtagagtaactaaggagagctgtgaaatatcaaaagaaaactagaggccaggacaaagaggcaatgtcagtcaagccactgcaagctggtatgcacccttgtatttcagccaaaggcaggcaatccaaaattacagattgctttccttaacttgaccaaacagtgcattttacctctgaaagtcttgtcaagggttgcatttcattgtacctagtaaaacacaaagtccactctcataaaaatattatattttccagaagaaatattatatgtaatacactgaaaatcactgattgcttttgcttctttttttccgtgaatgtgtaggtgtttgagtctcttgtgtttcttattttacataggatatgggctgtttgaaaactatttcattagcttcatcatcgtcattcatttcagccatttcagattttcgtctctccaaaaatgttggtgtacaaactggtgtgaggccctggatatccacagtcttctcaggagtgtcaagagtgcctaaaacctttttcttcttcttatgtaaaagatggccttttgtagacgtctgacaattagtttttgaaatactttctgttttctggaaaatcaaagaaggaagaaggaaaatcataatcaattcctttttttttttttttttttttgagattgagtcttgatctatcgcctaggctggagtgcagtggcccaatctcggcttactgcaacctctacctcccaggttcaaacagttatcctgcctcagtcttccaagtagctgggattacaggtgcctgccaccatggctggctaatttatgtatttttagtagagatggggtttcaccatgttggccaggctggtctcgaactcctgactgttggggtgatcagacccaacactagactgtgggggctatgaagtccggcggagtcaaaggaatgagaaaagacaagagtgcataagatgggtccaggggaccaatgctagtatggaggctgcgaaggccgcaagctctggaagcccgcactgtttattggtgatcaaacaaagaagcaggtagtgaggatgtgggggttgaaagaaagtggtgcatcaagcgcatgatttacagctgtgacagtttagcattttctttgacgcatatggaacatgttctgctacttgagataatgggaaacatgttcttctagtttaagatacacttgatctatgagcctgggaatgctagaagcaaggagccggcaagtctagacacattccagaggccacgaggggtttcatgctctgagccctggattccatccaagccatgaggggttttatgccctgggcttagattacggtgccgcagggcagccttccaccctttagcacagagcttggtgttccaaagaccacaagggcttttagaccctggaccccggcatgttccaagactctttatattatgtcagactagcaagccctgcctcagcttttttctcactacttagcttttctccaacatgacccccttttcttttttgtaaaaccaccacagctatcattgcttgttctcgatggtggctttctctccagaggtggcttccgcatctgcagactaaaaggagacagcacaagcacataattattagaacaggatttccaagtgtagagttttcaatggccttaatccgtttaagaggattgattgcagacaacccattggctgtcttgttcaaattatcagttccagggagcagggctaagtgagtctgagaggcttcaaaatcctgctcttttagttttacaatttagagggtgagattttcctctctaccctctagatggcgtttaaccttcttccatcagtgttctgtctcattgtaactgaggagtaacacaaaagtcagatgtattccagtcacattgcatttgaattctactttctaaattcataatacgatctcccatccaaatctctgtctgacggagatcattaatttggttaactattttttttttatctatttgagcttgggagttccataattttgtggaattcttttgccacttattgacaaattcagcagttttcacagatgaatgtacagccacaccggctattgcagcggtagtagtaacagcaatgaggccaattatagcaaagaaaagagcaactataaatctttgggataagagttttttaaggatttagttacaatacgaatggatgatgatgcctcccatggtctatttagagacacatagggatccaaactccttctctggctttaattatcaggatagtctgatttttattaaaagttggtaacatttcctgttgctagcataaaagatggccgaacacagctttgaatccaaaaggtcctgttggaaagaaaagagagagcatatttatttttacctccctcccctctataccttttatatgtaccctcccaacttttgattgaactttcagccatagctaatttccataattcagaatgttcctgtcttatggcaggagatatcatttttggactaggggcaacaatgccagcaggactctatatgataggggcattagcttccgtccgaacatactgtgtatgattcctttgccagcgattcctctggtttactacatttgttctacaagaaggccttccggtgcaattttccttaaagatccccttaggggactaatcaatggtgattccataggaattattttgtagcacctcagccttacttgctatacaatcttcccaagttcaagcatccacaccttcaaaccaaactttgcttcgctcacattcacgcttattaggatggaacttcagggttttaggattggaataattatattttaaactactcccccaaatcatatgcaaagcagcctgtgatttattttttccggggactactgccaaccaagcttgtgtgtcaatctgtaagcatccaacaacaggtcccaggcatatgggggatatttatatcctatagatatattcattttatcatcccttcctcattaggatgcattggcccttattcagaatggagtcgttctggtttgaatgcttcttacatatttccactttcccttttacaagaggatccttaatcctaaggcttgcagaaggatgaaggtccgtcttctgcaacttcttcatgctgaataggggtgatgatattcctgcctaactattagggtctcttgtattcaggtagagaggagctcagtcagaaagcattggtccgttaagcatctattgtacctctgaatcccagcaaaaggtacaaccttggtgttccagcagtttttcagcttcctgtgtggtttttcttgatctgtccccatgttatgggggtggatgtcagcatgactccggtcggtcctcgttccgtcttcgcattcagactcaactggctcatggcttgtactgggggaaccaggtccacggttgggatccatggatctctccagtctcccattccatggtcgtacacatcttgagggcatccgcacggtttgttcatctcctgcaaaaacacaagcataccctcaaagccatgttagtaaatctagcgaaacagaagcaaaaacttttgtggctgtagccgggaggcatgccattgctgaagcatttgttctacaagctgtaactcagcttctgcctctgtggttaattaccatggggtaaaactttccactgataatgagaaacaggccccttctaacagaaggcacagaaaaagcaaatcgaggcttatccttcttgtgcaacagtatagcagaaaagcaatccttaagccttcaatttgcactgtacaggtgggtccactagatgctgtaactgatgatacatcttcggatgtttggtgggcaccacacaggcacctgactgtcacctggagagacacaagcaaatcctcttccccatataattatctttcctttttctcagctctttgtatgtgcttccctccaccatatatcttgtccagactttttattttccttttctacattccttttttgtgtgtccaaattgcccacaattaaagcaagagcctgagaaacggggcacattccttcctactttcaatccagccatagcctgagctaaaagaggagccctatgcaaggtatctccaatgccatcgcaagccccagtatattcagccaaatgagccttccctctcataggtctgatggcagtttgacactctgcatcagcattttcatatgcaggaagctgtattacaacatcctgagctgttttatcagttatggctttatacacagcctcttggagccaagcaataaaatcaatatatggttctttaggtccctgtcggacgagctgaaagaaggatatttttccgctgtaacatttatcctttcccatgcccgtaagcatgcagggcacagctgaacaatggcaacatcctccattactgcttgattttctaatctaccccagttggggccaactcccatgaactgttcaaaggaaacaggcacaggtggctgcgcttgtgtgttttcccttgcctgagtttgagcttcatcagcccaccaagttttaaactgtaaatactgagacggagtgagaacagattttggtaaagtatcccaattatacggtattaacctagtatcaagagccacattttttaacaaagtttgcacaaaaggaaagttcggtccatattgagtaatggcttacttaaattcctttaataacttaaaaggaaaagtggcccaattagttatattctgtcctccttgctggattatagtaactggaaattgccatgcttcaaggtcttcctcagttctagctttttttttttttttttttaacagagtctcgctctgttgctcaggctacagtccagtggtgcgatctcggctcattgcaacctctgcctcccgggttcaagcgattctcctgcctcagcctcccgaatagctgggactacaggcgcacaccaccacgcccggctaatttttgtgtgtctttagtagagatggggtttcaccgtgttagccaggatggtcttgatctcctgacctcgtgatccgcccacctcggcctcccaaagtgctgggattacaggcgtgagccactgcgcccggcttgctctagctttttgaatagaattttgcatagcaccaccaattgctccaggttttaatgttgcaactacaggagcagaaaattttatagctaattcactttctcgcccattaaggggaaagggaggaggtggccattcacttaattcagcaggtagagccgatgggctagtaaaatatacttttttcggtttccccttttttaacctcttctcttttttgctccttgcattcagaatctgaagttagttttttacactcgtcctcctcttcctcatctgaatctccctcatcatctgtttgaaagggctcaagggctgcctttattagtgcccacattgaccaaacggaaactggaatttttgctccctctttatacgcctttttaaaatctctgccagttctctcccattcatccaactccatagtcccttgttctggaaaccatgggcaaaactgctttactgtactaaagagtgataacaaattttgagtactaactttcactgcccctttttgtaataaatgccttaagaaattcagataagcagaatgttcgctttcactttgtctgattgttaccctggttcttctgagcactcagctttcccaccgagcttctttcagtcatcctcgggtgtcctctgatgatacttcctccactttcatgtcctctagcgttccttcaccgggatcttcattgtcccatgttgggcgccaggaatgctggggtgatcagacccagcaccaggccatgggggctacaaagtctggcagagtcaaaggaatgagaaaagacaagttaaaagtgcataaggtgggtccaggggtccaacactagtatggaggctgcgaaggccccgagctctggaagcccgtactgtttattggtgatcaaacaaagaggcaggtggtgaggatgtgggggttgaaagaaagcactgcatcaagtgcatgatttacagctgtgacagtttagcattttctttgaagcatatggaacattttctgctacttgagataatgggaaacatgttcttctagtttaagatacaattgatctatgagcctgggaatgctagaaacaaggagccggcaagtctagacacattccagaggccatgaggggttccatgctctgagccctggattccatccaagccacgaggggttttatgccctgggcttagattatggtgccacagggcagccttccaccctttagcacagagcttggtgttccaaaggccatgagaggttttagaccctggaccccagacatgttccaagactcttttacattatgtcagacatgcaagccctgcctcagcttttttcccaacactcagcttttccccaatacctgacctcaggtgatccacccaccttggcctcccaaagtgctgggattacgggcgtgagccaccgtgcccagccagctaatttcttcctgagtaatctttatttctttttaaatcactcctcatctgtagcttttgtgttagtgtccgattctgattataccatttcgctgatggatttgatggctgcttaaatggaatattccagtgtttaaagagttctttatgtacttttccaggtggcataaaatgacactccaagagtctttcaccaaacaggtagttgttcattgtttcagcaactatcttggcaacatcctcagactcaaactccacaaatgcatagcctttgccatttccagtcattttacttctggacagtctgaactgtgtcacagtgccaaactgggagaaatatgaaaagatctgggtttcgttaagtagggttgttcttgttttttttgctgggttatgtgcttgcaaacctgcgccacctccttttgaaactggacatcttcctgcgggttaagcagtgagatctcagccaggccagaaaaagctgccatgccaaaagcggccgacactaactccacgcggtgctcctggaaacgtcgggctcccagctcccatgaggcagaaaacgggcatctattcttttaacatacgtatgtatacacagtccaagtgatggaacatcaggatcagtggcagctgggagggtgggggaggcagcaccacctgatatttaggagggagaatgaccgggagttgccgatacgtggagtgagggataagtcagagttgttcctaagattttgagtttgggcaatggtggcatggtaagctaagatcaaggatatgaagggaagaagggctttcaggctgggagcatttaggagagcatgagaggataatgcatgtgttttggacatgaggtacttgcagggtgtccacatacagatgtctgggaaacaatagatgcaggctgggtgtggtggctcacgcctgtcatcctagtcgcctggatagctgaggcaggaggcctgcttgaggccaggaatttgagatcagcatcggcaacaaagcaagaccccatatctaccaaaaaaatttaaggtcgggcatggtggctcatgcctgtagtcccagcactttgggaggctgaggtggatggatcacgaggtcaggagttcgagaccatgctggccaacatggtgaaaccctgtctctactaagaaaaaatacaaaaattagtcaggggtggtggtgcatgcctgtaatcccagctacccaggaggctgaggcaggagaatctcttgaacctgggaggcggaggttgcagtgagctgagatcgtgccagtgcactccagcctgggaaacagagggagattccatctcaaaaaaaaaaaaaaaaaagtcaagaagaaataaacgtggtgctctctggagctggaggctgttgatgtaggtgtgggaattaccacttgggagagttcatctctgcctgtttcaaaatccatcgtgagcattgccagtgctttcttgaagagctctcatgagcgtggggcaggattggtgccatcttcatatcacaggctgtcttagttcatttgtgtggctatagcagaataccacaaactgggtaatatttaaataataaaaaagtacttctcatggctctggaggctgcgaagtccaagatcaaggcaccagcaggttcagtatctggtgagggcctgatctctgcttccaagatgtgcctctcttatggaaggtggaagggcaaaaaggggccaacactgcgtgaagcctcttttatagtctaaatcccattcatgaaagaggatccctcatgacataattacctcctaaaggccctgtctcttcatattattgcattggggattaagtttcaacatgaattttggagggacacaaactttcaatccatggcagaaactctttgcagagccattttgctgcaaaaacttgagggtgggggtatgacttatttaataaagatgacattttctgtataaatgatacctaagtcctcctcattagcaaatgtcgaataggacattttctttttttattattattatactttaagttctagggtacatgtgcacaacgtgcaggtttgttacatatgtatacatgtgccatgttggtttgctgcatccattaactcatcatttacgttaggtatttctcctaatgctatccctcccccatcccccaaccccaccacaggccccggtgtgtgatgttccccgccctgtgtccaagtgttctcattgttcaattcccacctatgagtgagaacatgtggtgtttggttttctgtccttgcgacagtttgctcagaatgatggtttccaggaataggacattttctttctttttctctttctttctttcttctttttctttttctttttttttttttttttttttttttttgagatgcagtctcactctgttgcccaggctggagtgcagtggtgcaatcttggctcactgcaacacccacctcctaggttcaagtgattctcctgcctcagcctcccaagtagctgggattataggcacccgccacaacatctggctaatttttgtatttttagtagagacagggttttgccatgttagccaggctggtctcgaactcctgacctcaagcgatccacccgccttggcctcccaaagtcttgggattacagccgtgagccactgtgccccgccccgaataggactttttctgttgcctcttaaatggtttaaagagggcagccaataatggggtcagaaagcttctctctgcctagcttcccaaaaaaacaaagctgccagctggctgttggacaggtgagaagtctttggtgagatgcttcatcatcctctctttcctgaactcttcacgtgtaccagggctctggataggagggggtgctccaagaaaatgtttaggaaagactagggtttcctgatagaatgggaggaatcaacacactatctccccattgggtgtctgtgtgggcagccaacttcttgctgtgccctgcatctccctgcgcaggggagaggagcattagagaggaaaagctgggggcaacgaggagcttggggcagtgtagcctgcactccacagtccagcatggttaggatgtgtgggtttctgagtcctttctggctactataacaacaataccataggctggatgggttgtaaacaatgaaaatttatttcttatagttttagaggctgggaagtccaagatcaagatgtcagcagattcagtgtctgatgtggactcacttccaggcttacagatggtgccttctggttgtgtcctcacttggtaggagggacagctctctggggtctcttattaagggcactaatcccatttatgagggcaccaccctcatgacctaatcaccttccaaaggtcttgacttcaaatatcattacattgggggttaggaattcaacctagactttggaaggacacatacattttgtctatagcagggggtggatggacacgaaggagggtagctgggcttctgcaatctaggtgatatgtcacccaagaaagcggtaagaggctgcatggtgtctgccaatggtggaattggagaaggtatgggagaagcaggggacacaactctcatatcaagaaacagaggaggctgggcacggtgactcacatctgttatcccagcactttgggagactgaggcaagcaaagcagttggggtcaggagttggagaccagcctggtgaacatagcgaaaccccatctctagtagtaaaaatacaaaaattagctgggtgtggtggcgcgcacacgtgtagtcccagctactcggaaggctgaggcataagaatcgcttgaacccgggaggcagagtttgcagggagccaagatcgcaccattgcactccagcctgggcagcagaacaagactcttgtctcaaaaacgaaaaccaaacaagcaaacaaacaaaaaaacatgattgactcagtgatcagaaaacatataactattttatattcatacttcctgcagttaatgtcccagttgactggttaaaaagaatatttgggggccaggcgcagtggctcatgcctgtaatcccagcactttgggaggccgaggcgggcggataacaaggtcaggagatcaagaccatcctggctaacacagtgagaccccgtctctactaaaaatacaaaaaattagctgggcgcggtggcaggcacctgtaatcccagctactcgggaggctgaggcaggagaatggcatgaacccgggaggcggagcttgcagtgagccaagattgcaccactgcactccagcctgggcgacagcgagactgtctcaaaaaaaaaaaaaaaaaaagaaaaagaatatttggcaatacggaaagttccccttgggttttctgactccaagcctggtgtttttgtttgtttgtttgtttgttttcatttgcacaacattgcctttccccaagagtactggataacaatgccctccctccaagtcccaagtcactattgcagaagtcaggaccttaacacacacatttcaaagttactgacacctagtcaaacctggtgccttagcaatgcaatcttgtaatttcccaggtcaaacagatcttcaagggttgctctcatggcagaatttggtggtagaaggaaggaagcagagtctcagtctttgtgcagcttgtagggagttccctttttctcaagcccttgcagcatccttcccactctaagcttaaaggagactgtgtaaccagcagtgctcacccatcctgggcctgagtttgaatcccagctctggagttcagctgtgtgacatgcaagaccttgtccctctctgaagtccttctgtaaaatgaggtggctgcattgggtgatcccattccacaccatgagtctatagtcctatcatcctgggtataccgacgtctggtggccaactttggtccttgcagctaattcaggttttttctttgtttttgagacatagtctcgctgtgtcacccaggctagagtgcagtgacgcgatctcagctcactgcagcctctgcctcccaggttcaagcgattctcatgcctcaggatcctgaatagctgaggaatacaggcacctgccaccacacctggctaatttttgtatttttagtagagacaggctctcgctctgttgctcagactggtctcgaactcctgagctcaagtgatccgcctgcctcggcctcacaaagtgctggattacaggcgtgagccaccgtgtccagctcagtttttaattttttatttttcagtatctggagtgtttagcacagccaggaaacaaaacacaccagagagggccaccttgccatgtcaccaacgatgcaataactaccgaagaaaggccccttgggtggctatggaggagcagaggtcagcagaggagatggccagcaaagtgctctcctttgctctatttcttttcttttgagacggagtcccactctattgcccaggctggaatgcagtggcatgatctcggcttctgcaacctccatctcccaggttcaagcaattctcctgcctcagcctcccgaggagctgggattacaggtgcccgccaccacacctggctaatttttgtatttttttaggtgagacggggtttcaccatgttggccaggctggtcttgaactcctgacatcaggtgatccgcccacctcagcctcccaaagtgttgggattacaggcgtgagccactgtgtgattcttagcatgttgtaagtttgtcattgttccatttccaaagcattccaacctccatccccgcatgcgtttgcacttctttagatttgtgggtctgagagcgcattagcaccccatccacatgcagtctcctgcccttccaatcctcaccctgaaaaccttcctgtagtcacagacctagtcatttttcccacggctactcttgaactctttatggacctctgcgctcgcttcctcttctgtgaaaacaaatgagtttatgtagattaagatctagccaacttctgtaaaggatcagatggtaaatattttaggctttgcaggctagtgactcaactctgcatgaaaataactgcaatgtgtaaaggaatgagcatggttgggcaccacactgaaatttgaatttcatctccttcccaggggccccagaagagtcttcttcttcggactttttccccaagcatttaaatgtaaaaacatttctagcttgcaggtggtatgaaaataggcagcaggctggaggtgactgaggagcctatctagtcttttttttttttttaaacagagtctcgctctgttgcacaggctggagtgcagtggcgccatctcagctcactgcaacctcggcctcctgggttcaagcaaatctgcctcagcctcccgagtagctgggactacagttgcgcaccaccacgcccagctaatttttgtatttttagtagagacggggttttaccatgttggccaggctggtctcaaactcctggcctcaagcgatccatcagcctcagcctcccaaagtgctgggattacaggcgtgagccactgcgcctggctgtatctagtcatctttaaagaccctcccatctctgagaacccatgaaactgcgcagtcctctggactggagctggggtgtgtcaaaggcaaatctttgcctgccttctcagaacaccatattcagagaaggccattcaggacagatttgtcaggctgttccgaatgcccaggtctgggatgagatggcctatccatggaggatttttattttttcgagacagggtctcactctgttgctcaggctggagtgcagtggtgtgatcttggctcaccacagcctctgcttcctgggttcaagtgatcctcctgcgtctgcctcccaagtagctgtgttacaagaaaggggtcctgatctagaccccccaagagagggttcttggatctcacacaagaaataattcaagacgaggcggtaaggtgaaagcaagtttattaagaaagtaaaggaacaaaagaatggctactccatagacaagagcagcgcctagagctgctggttgcccacttttatggttatttcttgcttatttgctaaacaaggggtggattattcattcctcccccttttgggacatatcgggtaacttcctgatgttgccatggcatttgtaaactgtcatggtgctgtcaggagtgtagcagtgaggacgaccagaggtcactctcgtggccaacttggttttggtgggatttggttggcttctttactgcaatctgttttatcagcaaagtctttatgacctgtatcttgtacggacctcctgtctcatcctgtgacttagaatgcctccactgtctgagaatgcagcccagtaggtctcagcctcattttattcagctcctattccagatggagttgctctggtttaaatgtctgacagctgggactacaggcacacaccaccaagcccagctatgttttgtattttttgtagagatggggtttcaccatgttgcccaggctggtctcgaactcctgggctcaagcaatccacccaccttagcctcccaaagtgctgggattacagacacccaacccatttggaggattttttttttgagatggagtctcgctttgttgcccaggctggcgtgcaatggtgtgatcttggctcactgcaacctccgtctcccaggttcaagtgattctcctgcctcagcttcccaagtaggtaggattacaggcgcctgccaccatgcccagctaatttttgtatttttagtagagacggggtttcaccaagttggccaggctggtctcgaactcccgacctcaggcgatctgcccacctcaacctcccaaagtgctgggattacaggcgtgagccactgtgccctggccagatgtttttttaaaagagagagaaagagagagagagagagaaagagagagagagagggagagaaggaaactttgcactctgttatcttcaacctcttactctaccttcctccctagccgaagtcccagtcctaaagcctaagagaccctcattggaacttgacttctgcataatccgcctgggtgcccttgggcatccgggcctcaggcctgggtctgacgcctgggaagttgagcgtggcataatggagctcctcttggctctcctgggattctggggcttgagtggatgatttgggttctgggaaactgggcaactgatactgctttttctggttcttctttgattctggggagggagcacctggtggaagaggggtccgaggactgtttggtgtggctttctgattccgcttctgagcctgagggaagaaccaccatccttcattcattcattcagcaaatatttgagcacttaccacgcgtcgggcactgatttacagcacagagtgaaactaagtccctgcccttgccttgctgagcttgcattccatcttggaaggaggaacagacaataattagcaaaagtacaatgactggtaagtgacaaatgccatcaagaaatttgagcacctttagaaggcagcgaaagggagggtgggatgactgtttaataggtcatccagggaatttcaagaccggcctggccaacatagcgaaaccctgtctctaccacaaatacaaaaattagccgggcgtggtgacacatgcctgtggtcccagctactcaggaggctgaggcaggaaaatcacttgaacctgagaggtggaggttgtagtgcgctgagactgcgccactgcactccagcccggacaacagagacaaaatctgtttcaaaaaaataattgatagccgggtacggtggttcacacctgtaatcccagcactttgggaggctgaggcgggtggatcacctgaggtcaggagtttgagaccagcctgatcaacatggtgaaaccccgtctctactaaaaatacaaaaattaggggggcatggtggtggatgcctgtaatcccagctactcaggaggctgaggcagatgaatcgcttgaaccaggaggtggaggttgcagtgagccgagaccttgccactgcactccagcctagacaacaacagtgaaatcccatctcaaaaaataaaataaaataaaaataaataaaataaagaatagcatgcatgcacggagagaaagactggagggggtgagaacggaagcagagaaggcatgcagaaggggccagtggtgcccggggtggggtggggggtgttgatgcatggcttgtagtagtgagggaagagtagggagaactggcttggttgtattttgaagggaatttgctgatggattggttgtggggtgacagagaagagaggagtgaaatatgattctaaagctttagacttggctgggaaaatgtggtgttatttgctaagatggggatagagatggagcataaatggtggaattagtctttttttttttttagatgaagtttcgctcttgttgcccaggctggagtgcagtggcatgatctcactgcaacctccacctcctgggttcaagtaattctcctgcctcagcctcccgagtagctgtgattacaggcacccatcaccatgcccaggtaattttttgtatgtttagtagagatggggtttcaccatgttgaacacgctgctcttaaaattttgacctcaggcgatccacccacctcggcctcccaaagtgctgggattacaggtgtgagccagcaggcgtggcctttttttttttgagacagggtctcactctgtcacccaggctggagtgcatggtgtcatcatggctcactgtagcctccaactcccaggctcaagagatcctcccacctcagcctcccaagtagctgggacaatgggcatgcaccaccacacccggctaattttttattttttttgtagagaagaggtctcactatgttgctcaggctggggaattatcttaagttggttttggacaggctaagtttgaagtgctgattagacacccacatggagatgttgcatagacagtcttcagggaaggagccacgagatacaattttgcagtcatcagcataagatgttatctcttaataatttccagaatttacagagtattacccaggggccaggtgatattctgaatattttattatgcaagtacaatatatttaacacccagcatcatcctaggaggtggccgctagtattgtctccatgttacagctaaagaaattgaggcacagagaagttaagacacttgtttcatgacacagtgatgacagcaggatttgaacccatgcaggctgatttcagaccccctgtgctgaatccctaggatgcccagcctcccgatgatacacataattgttaagcagttaagtgtagtcatgtcaatggtggcagtaataatggaacaatggctacagattgagaaagtgcatgtattctaatcctcaaaccaactctcaaaggagacagaggaagaaatgaaggctcagagggggtgagtgacgtggctgaggtctcatagctagtaagtgccaggcaggatttgaattcagaactatcggtgcttttcccaccttgatgtcgctaagacaaggggtgcaaaagtcagaaagtgggatgtcagctttagagaagagaaaaagtggaagcatggcccagacactcaccagggggccagccgtcgggaccacattgatgtaatccaggatcgtgctgtgccgggagaacctgggcctcggggtttctgtctgagtccgtctcttcggtagaatcttcatgctgaggaaatgaacccacctgtttgtgccctgctgcacctccctgtgacagactgccacgtttactacctgagaccgtcactatgacagttactactgttaccacttgagaccgtcattatgagactgaaagaaggaggacaaacgtagaaatgaaaacttaagacaaaagaaattattttaaaggaaggggtcaggggaagaagaagagggttccctgctactagtgagccagggcagctgtctgagcctctacagccctttgtatttattgggtagaaagagcagagagcaggaggtaacaattggtcagctgtttaattgatcacaggttcatattattactaacaagcttcagctgtgcctaattacaagaaacacttcgcttggggcgtgactgccctcagcattccctctgggaagcagacgcagtttgtcagttggacaacattctgcatttatgagaacagtttgctgtttactcatgtaacctccagaggtatactgcgttgatcacgaccttcactctttcggcctgcaacacctcccctcttcctgggtccaggccccagaccccgccacgcctcctcttaacctacatgatcagggccaggcagaggaaaagaagagccgtgatgccgattcccagaaacgctccgttggagaatgccgttgagatgagtcccttcttatctgcacacggagagggcaaggtgagcatttcccatccacgcagggctcacgaagcccgctcatcactcggcattaaggcttccggttcccatggcggacattgtatctgcaacccctctgtttacttttaggaaaccctgccacaccccggcccaggtgttaggacttcccattgtgttttcctgtctacatacagatgccacgggtctgctgtgtccctccaagctcctgctccaaccacaggaccctactctttgccccagtcagcttctcctccaagaaccttggcatccaggcggccccctaacctggcagctgcaggatggatccactctgggccccatggacgttccaggcctcacagcggagcctgaggccggagctgagccctccatggaggctcagggagctgttggcccagggcccggctgagctgggggtgacctcgaaggagtcctggctgctgttcccctccagcagctcctccccaagccaccagcgcagagagggggccgggctggcctgggaggagcagctgcagtgcagaccctcagcctcccaggagcaggaggggcccagcagcttcggggagtctgaggggagggaggacaggactcagcagggtccccttcctgggacccaggtgtcccctttcccccactcacagtgcacggagaggctgagagagacgtgctgggagcccagtgggtgccgagcgtggcaggtgaactctccttcgtgctccacttgaacccgaggcagctccaggaccccggggtctgagggctgggaggggctcagaacctgtcccctctgggtccagctcagcctggctggggggctgctgtgtgtgacacagaccaggcacaggctttggccctccagtactgggagagacgtgccgttcccaaggttttccaggactagggaaggaagaggcagaatcgatgagcagctcagggctcagggaccctcctgcgtggggaccctccagactcctgggcccccaattcggcactgagaggccttggctcctctgtcccctttcctacctgtcctgtttgcttgggaaaccatcactctcaggttctctggaggatctgaaatggagacaggggaccggctctagacggaccaggggcttccctctgggtaaagggaaccatcctggacactgaggtgggggaagtgggtgggatagaagggcagggcagaatcacccactgagtcccagacacaaactgcatgagggtctacacaggtaagaaggtcggtctccgaggcctggggctccaggccccctcagctctgggaccctgagcccagcccctgtatccctctgccctcccaatggactccaggcccctgctgggcacactcacactgcacagagaggtccagggctcgctgctgggagccaagcctgttctccgctcggcaggtgtagcgccctgaatccccagccttcaccccgggcagctccagccccaggggtctagggccccagggatgggacgaggagaggactctgttctgcaggacccagctcagtgtggcagggggctggctgtcagcagcacagaggagccgcaggaactggcctttttgggcttccaggtatgggacatttccctggggctggggctccagggctggagtgggaggaaaaaaaaaaaagagagaaagggagggagaaagagagaaggggtacagggaggagcacatcccctcatcccctgaagccttttcatctaaagacaactggcccagccccagcccgacggccctcagtacctggcgtgttgtcacgtgaaatgctgataacaaggtctctgggggcatctgcaacaagattgtgagctggcttcagggagggacaatttattcctcacacctggaaaaaactccctcagggaaaagaaagtgggactatcccgggaagacaagtgacaaccagcgccagggctcacgtgtgtggaccagacgccattcccatccccctcccagggctgcggcggcatcctgggaccccacagcttcctctccctggatgctcctgagctgggagccgctcactgtcccactgggctcctccacctccccacccaccggggctgtctgcacaccccaccctcccaggccacactcacaggccacacggagtcggacggtcctctgtgcgctcacaccctttctggagaagtccacatggcaggtgaggtcggtgttgtggtcctggggtctgggcgtgaagctgagcactgagaagtgggaggtcgttggtttggttccttgggaggagagggcagcccccgtccaggagaaagaagggggtggacattcctcaaaggcccagttaaacacacagatgaccgtcaccggctgcccgggctccagggtctcggggatgtagacatcaggcttctgagtcagggctgggacagagaccgtggtgggagattcttgtgctgcaggggtccctgagagccctctctgctcagcccataggctgtccccagggtccctccccagtgtgagaggcaggggttcccaccccattccatacctgttacttttagaaagaacccatcgttcatgaaattatatctcacatagcttcctctctccacccgaaagaagtactgtgactcatcctgcatctgcgcgtctctgatcaccaaggagcagttccccttggcgggatccccagtgagctggaatcggccccgggtgctcatttccacctctcgactctggtggtttgtggccacaggagcacccttggttgtctcagtcactgctttgaaccagtagccataagctggggtagaccctgtccagtcctgtcgggggtaggagaaagagcagggcacagagatgcacaggccctccggcaccatcactgactcctgcactcgtatccagaatctcccatccatagcctgggaccctgtggggagacagaggctcaacctgcaaccccagccctagctccgccccaggtcctttccggcccttggcccactcaccgcccagcagcgaggacagcagcagtggcagtagcatctccgcataggaggcgcagggcctgcctgagacaggcctgttctctggtcgtgctgtgagtggctcagggctcttggcagaaggggaagccgaaggcggaagctgagccctggggcctgatgcatgaaatgagcttcagacgctgagctcacagaactcctttgccttcccccacactctccggcccaccttgcccagttgtcctctgggtctcctgggggcccagcctggccttgggcttgttgagctggtccttccagagctccctgtgtaggaggagagggcaggcttgtgtctatcctgggggcctggctgggggtggggtagtggggtgggggctctccctctgggccctgggtcatcggaaaagcagaagtgagaagtccacagtgagctacccttatctgggccactggtggtggaggtggtgggtacaggggaagggaccgttactggagggggctggtcttgtcaggtaaaatgcaggatgcctggttaaagctttcacagacaatataaagtattttattttatgttttttggtataagtatgtccgaaatgctgcatgggatatacttataccagaaagcaaaataaatttatctgaaattcaaattaattaattaattaattatattttgagacagagtctcactctgtcacccaggctgcagtgcagtggtgcaatctctgcttactgcaacctccacctcccaggctgaagtgattctcctgcctcagcctcctgagtctgggcttacaggcacgcgccaccacgccaagctaatttttgtatttttagtagaggtggggtttcaccatgttggcagggctggttttgaactcctgacctcaaatgatccacctgccttgacctcccaaagtgctgagattacaggtgtgaaccaccgcacctggcctaaaattcaaatttaactgagcatgttgaatttctttttttctaaatctggccaccgtagggtggtgtcagctccacctcttcatgcttcctggtgagctcactgacccttggtccccagaagcagtctcctgccccaaccaggccctagtccacttcccagtctcccttcctcctctgtcattcaattgggacacccattgggattagaacacatatgtccaaagctaatgctgatgggaagagtttgaggaaggcgggagtgaggggcagagtggggggaacagactagggaaggggtaatttgcaatgaatggagtaaactctacaagatgttttcccctcactgagctcttcctgaaatgactctgtttgggtcacaccgaaacacagaactcatccttcaacctccacataccttgggtatcaagcactgagctttagggggacttggaggtgaatcctccatggtgagtcagctccagggccccaggttagcaaatgaagattcttagaaacaaagtacagaaggtcccctaaatgaactggatgctggacagacattcaggatgggacctggggaaggagtggtcagctcttcctggtggagggaagtcaggagaggcctcctggaggagatgacccagcctctgccctgtcctggttctttcatccatggcatttttgttttttgtttttgagacaaggtcttgctctgttgcccaggctggagtgcagtggtgtgatcatggctcagtgcagcctccatcttctgggctcaagcgatcctcccacctcagcctcccaactagccgggactataggcacacaccaccacgcccagataatttttgatttttttttttgataatttttgtagagacagaggtgtttgtttgtttgtttgtttttgttttttgagatggagtttccctcttgttgcccaggctggagtgcagtagcatgatcttggctcactgcaacctccacctccggggttcaagcgattctcctgcctcagcctcccaagtagctgggactacagacatgcgccaccatgcctggctgattttgtatttttagaaaagatggggtttcttcatgttgttcaggctggtctcgaactcctgacctcaggtgatccacccgcctcagcctcccaaagagctgggattacaggcgtgagccactgcaccttgctgagacagagtttcaccatgttggccaggctggtcttgaactcctgggctccagtgatcctcccgcctcggcctcccaaagtgctgggattacaggtgtgctccacggcctcatccactgtatcagtcgcttgagctgctgtaacagcgtgccccagacagaggggctgaaacaacaacattgacttcctcacagttctgggactagacgtccaaaaccaagatgtggttccttcagaggcttctgcctggcttgcagatgccacttctccctgtgttctcacacagctgttcccctgtgggtgtctgtttcctcaactcctgctcttataagaacttacaagaactcaagtcatattggactaggcccactctagtccaaatgagtgacctcatttcagccggccctcagtatgcacaggtcccacatcccggaattcaaccacctgcccatcacggcatttaaatacaaaaccaacaaaagccaacataaccataaaaaacagcatgaattaaaaatacagcataacaactatttacaccgcattacactgtattaggtgtgataagtaacctggagatgggaggatgtgcagaggtcccacgcaaacactactgtataaggcagctgagcattgtagattttggtatccaaggggtggggatcctggaaccaatccccaactaatacagtggaacaactgtatctctttaaagactgtctgcatgtacagccacattcttaggtactggaggttgggacttcaacacagaaatttggtggggggaggggggacacaattcagaccctaatatccacctctccccatttttttttttttttttttgagagagagtgttgctctgttgcccaggctggagtgcagtggcatgatcttggctcgctgcagccgctccctgtctgattcaagcgattctcttggtgcaggctcacgagtagctgggactacaggcgcctgccaccacgcctagctaattttcatatttttaattttatttttatctttttttttttttgagactgggttgtgctctgtcacccaggctagagtgcactggcatgatctcagctcactgcaacctctgcctctcgggttcaaacgattctgcgtcagcctcccgagtagctgggattacaggcgcctgccaccatgcccagcttatttttgtattttcagtagagacagggtttcaccgtgttggccaggctggtttcgaactcgtgatctcaggtgaccctctcacctcggcctctcaaagtgctgggattacaggcgtgagccaccaagcccagcttcaccttccctttgatccctgcttccctgtgacctaatctgggccttctctgaggacaccagcctccttcccgcaggggagctcttgtggtgggacacatcacaccttcctctccacagagctcagaaaagggcctctcccagggaggagtgaggggaggaaaggtgcctgggtcctggtggaggtgggtccctaaggagctgatgatctctagggcccccagcctgggcccagccccacctctgcctttgaacatttcacacccatgggatcagccgacaggagccaggagagcggcaccgtcttcctcctcccgcgggtttctccacatcgctgccccctcccattcccccctcttcacttttctgagttcctgtggtttctgtggcctcctcaccacgtccccttctccagcgaggccagagcccccgacgccccgacttgctcccagcccttcctacccaagccgccctcccagccttggtcagacaggactggagaggctgcctggggccccgggactggtttctgggcagcctcaagtctgttttctggcctgagaaggttcgggttttccctgagctgcttccctccaaaaccagctccctcaataccagcctcccacccccgcacccgcctctccttcattcagcaggggctaggcgcctgctcttcctccataattccacacggaggggtttaggaagccccacccaggctccagaccccggagctgcacgagggcacaagtgggcgctggaaggaagggcggggacggtgggaggtgggggagggagaggcgggggtgtctgacaggggtcggggcaggatctcgccccggggggcgcaggtgcggcgtgaggaccgcgtcctgaggagggaggggcgagggccagggtcctggagaggatggagagcccacgagtggctgcagctgagaccccgagggagcccaggaggttttgtcggaagaagggcgatctggaccttccctgaccagcgtctttgtgtcctttgagctccggacctggtcctgggttcctcccacctcgggctgtgctgcagttcaggacgccgcccccagggggcgctccaccttcagagcaggcggcaccgcggagcctcgggccccagagcccgcgctgtccatggtcctgcagaagggaggctcccaagggaacgagtcccaggctctggacacgtttgcagacagtactctctaaaaaggctacttttcgccacacattagaacaagatctcctccgggggaatcacattaaagcaaaaacgaagtcaccatcgtcactccacttctctcatcccaaacccaccctccccaagatataaagcccttcaaaatattcacactctttttttttttttgacagagactcgctctgtcgccaggctggagtgcagtggtgcgatctcggctcactgcaagctccgcctcccgggttcacgccattctcctgcctcagcctcccgagtagctgggactacaggtgcccgccaccacactcggctaatgttttgtattttttttttcttactagagatggggtttcaccgtgttggccaggatggtctcgatctcctgacctcgtgatccgcccgccttggcctctcgaagtgctgggattacaggcgtgagccaacgcgcccggcaatattcacactctttacagcgttattcccaaatgacttccacccaggcacattaagcatgtgatgtccacataagaaaatgcgctcctgggggcttttcaggtcattcatctttgctttgtctggattggggtcgtgtatatttcaggggctcttagctgggcctccgtcctttccttttcaagtcagaataacacgttgcagggcaagaagagtgaaatatcactagaggatagacttggattcaccctaatttctagtgaaggaaaaattttgcaagtgcaacactttattgtcagatataatagtgacttactggtgtgtgagtgtgatatgacactcacttcaagcattagttttccaaaataagattcaactccttatgtcaaacccctaagttgtctgtgatctgacacctgttacatatgtgcatttcagatattttcccccatctgttaacttttcttttactctcctgttatttacagaacagcaggactcttgctccccaaaacatgagttacccatgaaatgatcccctactgtggatggaaaagaagagccaagaagataaaaatagccctggaataaagagaacactaggtccatcacaggagagggtgaaaggtaaagagccttaaaaaggccaacctaggccggcatagtggctcacgcctgtagtcccagcactttgggatgccaaggcgggaagatcacctaaggttagcagttcgagaccagccttgccgacatggtgaaaccccatctctactaaatatacaaaaaaatcagctggatatggtgtcgggcacctgtaatcccagctacttgggaggccgaggcaggagaatcgcttgaacccaggaagcggaggttgcagtgagctgagacagcaccagtgcactccaggctgggtgacagagcaagaatccatctcaagaaaaagaaagaaagaaagaaagaaagaaagaaagaaagaaagaaagaaagaaagaaagaaagaagtcaacctaaatgcaagtgactttcaagaagaaacaccaatgctgtttaatggaatataacaaaatcaagcagccaatcacataaaaatcacaatgtccagtatatagagagaagaaaatcagaaaaaaattacataaatatcactttcaattgtccaaatttgaccagaactgtaaatttacagatccaagatactcaacctacttgaaacaagatatcactctctctctttctcttctctgtctttttctatcacacacactcctgctctccacacagaaagggacataataatcaaataattaaaactcagtgacaaacagaaaatattaaaattagtcagtgaaaaatgcaaacttccaaccaagaagtaaaaattaaaattaggctgggcccagtagctcacacctgtaatcccagcaccttaggaggccgaggtgggcagttcacctgaggtcaggagtttaagaccagcctggccaacatggtgaaaccctgtctccattaaaaatgcaaaaaaatggccaggcgcagtggctaacgcctgaatcccagcactttgggaagctgaggcaggcagatcacgaggtcaggagatcaagaccatcctggctaacatggtgaaaccctgtctctactaaaaatagaaaagaattagccgggcgtggtggcgggcacctgtagtcccagctactcaggaggctgagacaggagaatggtgtgaacctgggaggcggagcttgcagtgagccaagatcacaccactgcactccagcctgggcaacagagcgagactccatctcaaaaaaaaagaaaaaagaaaaaaaatacaaaaaattagctgggtgtcatggcgggcacctgtaatcccagctactcaggaggctgagagaggagaatcgtttgaacctggtaggcagaggctgcaatgagctgagatgaagccactgcactccagcttgggtgacagagtgagactctgtccaaacaaacaaacaaacaaaaaaacccagaaaactacagtagaatgcccataaattttgcaagtcaagggattttaaatacaaaagggaaaaaatgttaacctagacccaatttcattaaaaatatcatccctggttcacacctgaatctcagttctttgggaggccaaggtgggcagattgcttgagtccaggagttcaataccaacctgagcaacacggtgaacccccatctctgctaaaagtacaaaaattagccagacatgcacctgtagtcccagctactcgggggtactgaggtgggaggattgcttgagcctgggaggcaaaggtcacagtgagccaagttggggccactatactccagcctggataacagagggagactctgtctcaaaaaaaaaaaaaaaaaaaggattattccaaagtgaaagtaaatgaaaatgtttcaaaaccacagctgagagaattcatcaccagcatgctaacactataggaaatgaagtcttcaggctaaagaaaaatgatactgtagagaaaattatatgaacacataggaatgaagagcaattaaaatggttaataagtgaataaatttgaaacagcttattctgtaataaaacatctttttaaaaaacaaactcttttcaggcagggcgcagtggctcacgcctgcaatcccagcactttgggagtccgaggtgggtggatcacaaggtcaggggtttgagaccagcctggcccacatgggtgaaaccctgtctctactgaaaatacaaaaaaaaaaaaaaccacttagccaggcatggtggcacgtgcctgtaatcccagctacacgggaggctgaggcaggagaatcacttgaacccgggaagcagaggttgcagtgagccaagactgcaccattgcactccagcctgggcgacagagcaagactacatctcaaaaaaaaaaaaaaaaaaaaaaaaaaaaagaactgttttcaataaacatggagtttataccaacatattatggggatgaattcgtggcctatcaaaatcacattaaagtaagcatggagaacaagatattgcatggattataactcaaatcagtgataacacatatcagtctgtttcctctcctgccttcccaaccattcctatagagccataaggaagaggtgtggaaaacagaggtgaggggtggagagaggttgttctgcccaggaggtgggaccgaggcacccaggcgctccttgctccagccatctgcagagtgagagtcttaggacacatggtctgaaggaccctcacctccactggggacctggagcccagacctcagctctgctgtgaggagggagctcagtcaccgcaagcagccgtatccccttgggagcccgtgagcctgtgtgggaaacacagttctgagaggagagaccagtgctgtggaaggtgtgctctggggaggagaggataggtgaagccactcagggatttgagggctcaagttatagaacaacttgagaagggcttctcccctgtgcagacatccaggtgatgtcacaggttaaaagaaagccatccccattatggctcccctgagcagggtgaggggcagaagccaggagccccactgctctccagaaatttgagagcaggaacaggcggtacggggagggggctgggggaaggaagacagaggtgggggtgtcctcagcccactcttcccttgcctaaggcgcccccaccagaatcaggtgttctgctaacactcaccctgcacagccaggctcagggagatggggtgggagcccagcagggcctgagcccagcaggtgaattctcttccatcccctaaaaccacctggggcagctccaggacccggggatgcaagggttggcaggggctcaggatcaggctgccctgggaccagctcaggctggcagaagggctgctgtcagcatcacagaccaggtgcagggactgccctcctgcaccagcagagaggcagcattgcccagaatctatgggactagggaaaccgagagagctggaggggagggctgagaggcccttctctccctgcgccttcccccagactcaggagaggaaactgcgtttctgagacaagcatcacaagcaagggcaagtaggggcgaagacccccagcatgcaggggtcgggaggctccttaatggtcccgggacaggggcatggaaacatgcggaggacttggccgtatcgggacacggagagaacgtcccaggacgaccggccttgatgtgcaaaaccgtggagggcactaaccctcgtggttctggccacttggaggaaccaagacaggtgacacacttgggctttctccaggagccacaggagccaggggaggagctgagtagggatgtgactgggaaagatttggttaaagagagactcctctttggggcccgaattgtggtcattgaagggagcaagaccggaggctgctaggccaggagggaggctgctgcaggtccaggcatcacccgggtccaggtaagcaaagttagactttggctaagtgggactgtggctgtgagaatggaggaagggagggatttgagacattttccagtagccaagtttgtggagctcttgcctcatgggaagacttcggtgaaattctgagatgtgtaaagaactttccaggacattgactgagctgactcacatgggtgggggcgcctctcaaggggaagtgatttgtgctcagaacaagctgcaccagacagaaatttgtgggcatcttccaggcagaggtagggctaggatacaaacttcctgaaagggtcatgcagagggaggctggaggcctggggcgccactttgagctagtagccatagctggggtaaagtcattccaacaaggatcattgttgcctattccattcattaattccacatttcctggaccccatttatttcttctttgttcaccatttacataaatattgactaatgacaatgcctagacctgattagatgaagtggtcgacagggtaatggcccccaaagatgtccacttgctaatccctgtgaaaggcgttagccagcttgcattaggcagacagtaagggaagggtcccctgagaacctctgacccacctgataagcagttacaccagatgttttgtgcagataagggaacttgcacagggggcttgcctaaacaccccagcaggggactaagggcccacaaacgcactgggggaatggggtggagccatcaggaattttcaccttatacaaacaggtaacccagccccatcagcttatataaaagcccttgtggctggttgcagtggctcatgcctgtaatgccagtattttgggaggctgaggtgggtggatcacctgaggtcagcaattcaagaccagcctgaccaacatggtgaaaccccatctctactaaaaatacgaaattagccgggcaccgtggctcacaactgtagtcccagctactcaggaggctgagacaggaggatcgcttgaacccaggaggtggaggttgcagtgagctgacatcgcacaactgcactccagcctgggcagcaagagcaaaactcctaccccacccacctacaaaaaaacacaaaaaaacaaaacaacaacaccttgtattcaactgtgagggggtaaccgagaacctgctttcaggaaccctctctttgctgagagctttcctttcacttaataaattctactccactccatcttcaagtgtccacatgcctaatttttcctggtcatgagacaagaacctggacctagctgagctaaggagccaaaaaccctgcatcacctggaaactgtgaatatgttgccatacaagataaaggaacttttatccttcagagccaacagccaagagttgcaaaaaaaaaaaaaaaaaaaaaaaaaagacaaagggactttgcagatgtgattaagttcaagttcaagatcttgagatgggcagaagatcctgggttatccagatgggcccagtgtgatcacagtgtccttataagaaggaaagggggagaatcagagtccgagagacaagatgtgaggatggaacaaaggtcagagaggagaaaagatgccacgaagttggctctgacaaccaagaaatgggccatgagcccggaaatgcaggtggccactgaacggtagaaaaggtgaaagaacagagtctcctctggagcctccagaaggaatcagccttaattttatagcccagtgagtcctcttccatccttctgacctccagaactgtaagaaaagaaattgtcttgtttcaaaccacgaatcctggggtaatttgttagagcagcaacaggaaaatagcacaggtgaggactaattgcactgcttcctccccagatcctacaataaactcaatgctattctttccattttatgtaaaaggacattagggctgaggaattacggataatctctctgagttggcgcacgtggtggtgatggattgaggatccaaataaagagtcaaaaaattatggaattcaatggagggcccctgaggcctgggcagggcaggtgtggctacagaaagagcccctggaagatgcctgcctgaccctgatccaggttactctcccgtgcagggagcagacaataaaccatgaacataattatgcagctgcgagttattaagcttgatggaggggagccggtgcagtgagagaaacaaggtcccaacacaatgcagcctctggggtccaggagccccactgttgtggggaaatggggtctggatcccacggtaaagggacgtccataggaataagcggggaggctgacacagccgggttctcaggtgcgtcttcctcattggattctcctggggctctgtcctgtgaacttctcttctctacctgcaatcagctcttaccctttcaaataccttttaattttggtaaaaaggaaatgcagaacataaacatcaccattgtcattatgtttatgtgtacggttcagttctgtgaagcatattcattctgttgtacaaccaatttccagaactcttccatattgcaaaattcactctgtacccacaaaacagcgactttccattttccctgtcctgggtgcctggcaaacaccactgtactcactgtttctgtgaatatgactcctttagaaatctcagtaggtggaactgtgcagtatttgacttttcatgactgtatttcccttaggataatgtcctcaaggcccagccttgtggtagcaggtgtcagaatttcttttctttttaaggctgacaggttcaaatgtatgattttaccaccttttgcttactcatctgcctctccagaaatccacctcttggctctggcgaatgatgctgccatgaacacgggagtataaatatctattcaagttcccactttttttttttttttttgagacggactctgggactctgttgcccaggctggagtgcaatgacatgatcttggctcactgcaacctctgccagtcaggttcaagtgattctcctgcctcagcctcccgagtagctgggattacaggagcctgcccccatgcccagctaatttttttatttttagtagagatggggtttcaccatgctggccaagctggcctcaaactcctgacctcaggtgatctgcctgtctcggcctcccaaagtgctgggattatactcgtgagtcaccatgcctggccctcaagttcccactttcacttcttttcatgtagaccagaagtggagtggctggatcctatgtgaattctatttttaattattggaggaattgtcatactcttatcatcctctttccccatcatctcttgtcatcactttataaagatttactctagagtagtcccccatccacagtggatagcttccaagacccccagtggatgcctgaaaccacagacagggcaaaccctatatgtgctacatttttatacacacacacacgtatgtatatcgatgataaattttattttattttatttttttgagacagagtcttgctctgtcaccaggctggagtgcagtggcgtgatctcagctcactgcaagctccgcctccatggttcaagagattctcctgccccagcctcctgagtagctgggactacgggcatgcatcaccatgcctggctaattgtcttctttgtatttttagtagagacagggtttcaccatgttggccaggatggtcttgatctcctgacctcaagtgatccacccacctcagcctcccaaagtgctgggactacaggtgtgagccaccgtgcccagcctcctactctttctctttctcctactctggccttgtaagacctgcctgcttccccttcaccttccgtcatgattgtaagtgtcctgaggccttcccagaagcagaggctgctatgcttcctgtacagcctgcagatccttgagccaattaagcctctttcctttctgaattacccagtcccaggtatttctttatagcggtgctagacctgactatacaatatgtaacatatagtttgcaatttgtaacattctacagggtacaattcagtgacattaagcacattcaccatgttgtgcaaccactatttaccgaatttcctcatcatcccaaacagaaactctgcaccatttgcacaatcacccttcttccttgccctgttccccagcctctgatacgcaattctactttctgtctccatgaatttgccaattctaggtaaggctacataagcagaattatatactatttgtcattttatgtgtggcttctttcatgtggcatgttgtttcaaggttcacccatgttatagcatgtatcagttccattcaatttttaaggctaaagaatatcccatattatggatatggaaccttttttctatccacttatcagtcaatggacgcgagttttttttttccccaccttttagctcttgtaaataatgctgctatgaacattgatgtataggtatctgtttaagttcatgctttcaattctgggaacatatctaggaatcgatggctggattacactgtatttctaggcttaactttcggagagaattccaaagagttttccacagggtcacaccattttacatgcagtgcaaaggggctcccacttgtccatattcttgcaaacaattagtatttttttttcttttgagacggagtctcaatctctcgccaggctggagtgcagtggcaccatctcggctcactgcaacctccacctccttggctcaagcaatcctcccacctcagcctcccgagtagttgggaccacaggtgctcactgccacgcccggctaatttttgtattttttgtagagatgaggtctcaccatgttgcccaggctggtcttgaactcctgacctcaagcaattcttcctctttggcctcccaaagtgttaggattataggcgtgagccactgtgcccagcttatgctttatattttaagagttctagtgacagtgcagtggcatcttatgtttaatttttaaaaatttacttaaagttagatatggttgaattcattctttatcatatgtaattttatgtgggttgaccgatgcatatagttatatacacaaccgctgtgaagacaatgaaaagtgtcattacctgaacatttcctccctctgctgactctaggtagtcaatcctccctctacacttagtccctgagaaaacacggatctattctccatccctgccattttgcctttttatagaatgtcatataaatggaatcatacaaaatgtatcctctaaaatctggcttcatttacttggcataatgcttttgaggctcatctatggggctgggtataaatctgtcattttagtttaattgttgactggtgctccattgttttcatggtctctcattttgcatgtatttgccatttgcggagcattgcaactgttttcaggttctggtgactctaaaataatgttgctataaacattccattcaactttctgcgtgtgaacataagtttttaattcccttgagtaaaaacctaggagtcgagtgcttggtcagacgtacacttggtcaagtgtaagtttaaatttatacaaaattgacaaactattctccaaagtgtatataccattttgtattcctaccagcagtagacatgagctctgatcacttcacatccttgctagcatgtgatatcatccacatattttaaaatttcttgttacctttgttgtacttttcagtcatttttcttaggtatgtaattctacctcattcttcttctattctacaattacctaatgacaaattatattgaggctattttcacggccttgttcgccatctgcttttcttttttggtgaggtggctatgaaatcttcagtagcttttttcttaattgtggtaaaatatacagaagaaaaaaattaccgttttaactatttttcagtgtttagagaagttgcaccaagtacactcacgttgttatgaatcactatgatttatctccagaagtttcttcaccttcccaaactgaaactgcatcaaagaggtgaaaaccccctatttctttctgatcacagcccctggcaagcatggctctactttccgtgtctgtgaatttgcctcctctacacacctcatataagtggaatcatacagtgtttgtcctgctgtgactgacttagaatatatttaaggttcatccacgctgcatcatgtgctagcttctccttcttttttttttttttttttttttttgttgttgtttgagacggagtttcactcttgtcgcccaggctggagtgtgatggcgtgatctcagctcactgcaacctccacctcccaggttcaaacaattctcctgcctcagcctcctgagtagctgggattacaggcacctgccaccaggcccggctaatttttttttttttttttttttgagacagagtttcgctcttgttgcccaggctggagtccagtggcgtcatcttggctcactgcaacctccacctcccaggttcaagcaattctcctgcttcagcctcccgagtagctgggatcacaggtacgtgccaccacacctggctaattttgtatttttagtagagatagggtttcaccatgttggtcaggctgctctcaaatgcctgacctcaggtgatccacccgcctcggcctcccaaagtgctgggattacaggcgtgagccaccgtgcccggcctgtattttcttttctttttttttttttttttagtagagatggggtttcaccatattggccaggctggtctcgaactcctgacctcaggtgatccacctgcctcggcctcccaaagtgctgggattacaggtgtgagccaccatgcctgtctccttggtttttttgtttgttttgttttttgttttctttttctttttctttttttttgagatagggtcttgctctgttgcccaggctgcagtgcagtggcatgattgggctcactgaaacctctgcctcccaggttcaagcgattctgctgcctcagtctcccgagtacctgggattacaggcacatgtcatcatgcctggctaatttttatatttttagcagagatggggtttcatcatgtgggccaggctggtctagaactcctgacttcaagtgatatgcccacctcggcctcccaaagtgctgggattacaggcgtgagccaccatgccccagcccagcttctccttctattttaaggctgagtaatattcaattgcatgtatacaatacactttgtttattcattcactttttaggaatagcagggttgcttttcccttttacctactgtgaatatgcttctgtgaacacagatgcataaaactatgctcaagttccggcttttgatcttttgggccatatacccagaggtgaaattgctggatcataagatcattctatttttaatttttttgaggaaccccactactactctctagagcaacttcaccatttaactttcccatcagcaatgcacaagagttccaatgcataagagatcacatggacagctcagcaagctgaataatggccacccaaagaaatacagtctcagctccttgaacttctaaatattaccttacaaataaagtgtctttgtataattttttttgagacagtctcactctgttgcccaggctggagtgcagtggtgcgatctcagctcactgcaacctccgcctcccaggttcaagtgattctcctgcctcagcctcctgagtagctgggattacagacgcccgccgccacacccagctaacttttgcatttttggtagagaccaggtttcaccatgttggccaggctggtctcgaactcctgacctcgagtgatccaccagcctcagcctcccaaagtgctgggattacaggcatgagccaccatacttggccactgtgcagagaatactgtagccacatggaatacatgtggttagggcactgtgttagctagtctgggctgccatagcaaaatactataaattaagcctcctataaacaacagaaatttatttctcacaattctggaggttagaagtccaaggttagaagatcaagttgtcagatgatttgttttcttgtgaggctctgtttcctggcttgtagatgccaccttctcactgtgtcctcacatggttgagagacagcaagttctgtggggtctctgcttataagggcactgtattagtccgttttcacactgctggtaatgacatacctgagactgggcaatttaccaaagaaagaggtttaatggacttacagttccacgtggccggagaagcctcacaatcatggcagaaggtgaaagtcatgtctcatatggcggcagacaagagatgagcttgtgcagggaaactcccctttttaaaaccatcaatcttgtgagaattattcactatcatgagaacagcacaggaaagacctgcctccatgattcaattaccagccgcaatgtccctcccacaacacgtggaaattcatgatgagatttgggtggggacacagccaaaccatatcaggcactaattccatagtgggtccccaccctcatgaccccatgtaacataattacctacaaaaagccccatctccaaatacatcacattggtggttagggcttcaacatatgaattttgggggaacataaacatgcagttcataacaggcattttactgaaaccttgtcatctcccatgccatgagtttagatcaacaaataatcatgcggaaaaaaaatctatatagaaatttcttacagcaaagcctctgctcattttttcgataatctcatttttttaaattgcaaggaacagaaatgaaaaccgatagcttaatctggaaaagaagggttttattaaaaaaacacgtttgcttaatttttggcccaggcagtggggaatctgggaacatctcctaactcaaggtcaagatcagcacatcactgatatccaatgtgaccctcagggtgctgtttcttgctctccgcatggtgggctgcaggtgcctgagccatcttcattctctggctagcaatgttcgtgcaatgtgaggtctccccagctcaaggctcatgccgttcctgcagctgaaagggagagcaacacctccatcctgtaagctccaacagcatcttcccgacagccacgaggagccacatccagttctttcctccatgtttttatgagcgaataggttgactggagtttgaacttctgggttcaaaccctcagaagttcaaggttcaatcccccattgacctattcccacactcgatatccatgataagaatgattctcagggtacattgggcttgttgacaaagaaaggaggattttttataagaatttccatctctgacttttgtccaacaattagattctattccttgtttctaaatgaaaatatgaagaaacacatcctttcggaactaaaataaataacactttgaagttgaaacagagaaaatatgaggctgcacatggaattagtaggaaattatgctctcatttgaggttattctgatttcgccaaggaagatttaagctcaaaaggtaaggtggacagggaatcaccccatggtgagacacatagggatattcgggcatagagtacaagctaattaagcttgatatgtacgaggaatttctcttagtaatcaatgagaatgtgaagtgtacagaaaataacttttgatgaacaaggaagagcacatgaatttacatacaagaaatctttcctcactgggcaaaaagctcattcaatttctttctttttttcaagccagagtctctgtcacccaggcaggagtgcagtggcatgatcttgactcactgcagcctcaacctccttggttcaagagattcttgtacctcagcctcccaactagctgggattacagtcgtgtgtcaccacgtcccactagttttttgaatttttggtagagatgaggttttgctatgttggccaggctggtctcaaactcctggcctcaagtaatcctcccagcttggcctcccaaaatgctggaattacaggtgtgagccatcatgcccagctttattcagttccttaaggaggatgagcagcattgagcggatgggaatgtgccttctctggagacaggtttgcatgtagagatgccatcataatttataaggacaggttttctcttttttcctattttttagagatggtgttttgccatgtttcccaggctagtctccaactcctgggctcaaatgatccacttgccttgacctcccaaagtgctgggattacagatgtgagccactgtgtatggctttcttttttcctttccttttcttttcttttcctttttagacggagtctcactctgtcactcaggctggagtgcagtggtgcgatctcggctcacttcaacctccacctccttggttcaagcgattctcctgcctcagcctaccgagtagctggaactccaggcgcgcaccaccatgcccagctaatttttgtatttttagtagagacagggtttcaccatgctggccaggatggtctccatctcttgaccttgtgatccgcccacctcggcctcccaaagtgctgggattataagcgtgagccaccgcgcccgaccccaggacaggttttctaaggctcatggcccttggccatttgctgcatgatctccatctccatagggctttgtagcagctctcattgcctctcccacaattcatgcatcaggcaatgcccaggaaccacaagagtataattaatattcacattcaaaatcatagttgtttctattcaatgttatagcatgcttttttttttttttttggcttttaatgaaaaaaagcattgatttctgttgtcttggaaatcagaggggtagacctggcttcaacggtggctggatttcagggtccgatgatataagggctcatctctctgtttgcttttggctcttgttcttgtttgttgttgctgctgtggttgttcatttattctgcctggtttttgttctcaggctaataaatgtaggagctctgatgtccactttgcagatgaggacgctgaggcatacagagatcaagtaatttcccttctgaggcagagtccgtggacttcccacagccccatgacacccccttatggctgtgtatccaactcaacattccctgccctgatcagggcgccccctgctgctcacccagagatttgccaggatccctgcaccaatctcctccaccctttttgactcccaaatgcttcttgacacctgactcccaccctgtcactcagagactaacctatgtcaagatttacaaactccccgggtgcggtggctcacgcctgtaatcccagcactttgggagcccgaggcgggcggatcacctgaggtcaggagttcgagacgagcctggccaacatagggaaacccccatctctactaaaaatacaaaaagtagctgggcgttgtggcaggcgcctgcaatcccagctattttgggaggctgaggcgacagaatcgcttgaacctgagagtcagaggttgcagtgagccgagatcgcgccattgcactccagcctggacaacgagagagaaactctgtctcaaaaaagaagaagaaaaaaaaaaaaactaaacaaacaaaaaacaaacccccaaaaacaaagatttacaatcttaccaaacaggaatggtaactacaggaagtagttactatctgaggttattggtaatgttattgctattgttaatgtcacttttttttcccactcccattttctctggaagccgtttgggaggtcctgcctctcaccttctctatccacttcttactcctaccagaggttgtagacaaagatgagggttgatgcattgtgcaactctgtggctccccctagtgatatgatacatttggggtgatggggtttgcctagacagggccccaaggatgctggtagggagcaggtagggaaccccaccttgtgtacagctcctcaaaaatcccaggttaacattccatttggtctccaggcctgataaatggggaggagtggctgttcattagtgtgcactctggctgcaccgggcaggactttgccccgggagggactgtgacgttctgctctcttggtaagaaggtacaaagctgggctccagaaatggattgagagctccttgggtctgctccccaggctgccacccgcccccaggtgagccctggatactgctattcctgactgaagagacagggttttggacaaggtgctccagaaggccagatttctctctgggcaaggttcatgtgtttcccacacaagtctacttctgggattcttcatggatctacaaatcggactaggcaaaagctgtgcatgctgctgtgtatacaaaatagtaaaccctgatatagacgatggactttgggtgctaataccgtatcaatggaggttcatcaagtatgacaaatgtaccactctggtgggagatgctgataatagaggaggttatgcatgtgtgggggcaggtggtatatggagaatctctgtaccttctgctcaatctgtgaacctaaactgctctaaaaattatgtctatcccgtcatatgcttctgggaaaaattgtctatatatattttttaaatggaaagaactggctgggcatagtggctcaagcctacatctcagcacttaaggaggctgaagtgggaggattgcttgagtccatgagtttgagatcagcctgggcaacataggcagactctgtctctacaaaaaaaaaaaaaaaattagctaggcatggtagtgcatgcttgtggtcccagctactcgggaggctgaggcaggaggactgcctgagcctggagggttgaggctgcagtgaaccatgatcatgccactgcactccagcctgggcaacagagcaagaccctgtttcaaaacaaattgaaaaaagcttaatgctcctaaatagggtattggttgaataagtcaacacacatcaaattcagtggaatactatgcagccatgaataattaacagtagtggtgcagagctgttgcttctccagtggggatccaggacccaagggcagggcgtgaaaagtgcttcagaggagctaaaggcagaaggtccactttgcatatcttctggggatgtcatttatactcaaatactgagtcaggtcaatcagacaactttagtgacaatgaatgcattattttcccgttgaaactaacagaaacgtgtttttccataggccacaaacattcatagggactttcagagtaaaacagaagacttcagagatattttgtaattatatctagatacagaagacttgagatattttgtaaatatatgctagacactcagagctgtatattcaccttcctctgattaaatttgcccttaatgtttcagaattcctaataaaggacatttaagaatatgatcccactttggtaaacattatgtatatgtgcatgagtgtatataacacatcaaaactgaaaagagaggatggcagattgcaggcattgttagccggcctctcccaccttggaaagatgaaacagtgtataaagatttatgttgtgaccttttcaccagggaccaacacaggaacttaacaggaaaactggaagaaaccacagacctttctaaagaaacggtgggcagcagcctacaccacgagccagacagaaaactgtgagtccccacagtgtgagaaggggagagactgactcagggatgtgcactcccactggggtgccacgcagtccaggccacaggagggggaagccctcaccctgcccagcactggagctgagttagggagcgttggggagtagataaggagtcacattgggatgtgcttggcgtgcagtcctgggctccagcagggacagagggaagccattcccgatgctacctcacagggggccttgcagaagccagctagctgactcaggaggcggtcacgggttgagagaagctcccgactgagatctgcaatgtcatcttgagtggggaaagtagacttgcccgaaatctaagactcataggtgttcttgagggagaagaaaaagcaaaaagttgagaaaattcaatgattggaaagatacagaatcaacctaagtgctcttcaacccgaaggaaaggctacaaaagaatacacatccctgagtcagtctctccccttctcacactgtggggactcacagttttctgcctggctcgtggtgtaggctgctgcccaccgcttctttagaaaggtctgtggtttcttccagttttcctgtgaagtctctgtgttgctccctggtgcagctgcagcgtaagtaggttagacaggcgtttcacagcctcccttacacagcctcccttaaagggaaacacatttgctaaatagacggagagaacaatccgccggacagctcgcaaaccccgacagcgcataaaccgcatcctgggctcgtggtcaaaacatcctgtagcaaggaggtagaagggaagaagggacagtccccatatccgtgcaagtgcagaaacccatgcttaggtagtgtccttgggctgacctatgctcattataatagtgaaaacacaccctcacgtggagacttaaggtgctactgagacagcgatgtatatgcactagcatgtacagccattgcgcatgcgggcctaacagaccacccagaacacgcttaagagcaacaccgtcccacccacgcatgagtaatcacggaagattcccctaaagggagtttccccagcgtcagtcagcgctgtctcacctttgagcagccgctctgaccagctgttaagagtgcacgttcactttgcaattaactctcttgcttacttttaccttggactcactctcgaattcttttcttgaggcaaagtcaagaaccggaactggcccaccagccatagcaggggagactgtgtgtgccgcggtgcaggcagcactcatgccgggaatggtgaggatggcaccagcttgtcggattttttgttggcatttgtgtttgtttctctactcaccacccaagtgataaaataggatccttggtgtggaacttagaattatgccaaaaagctaacagttctcctttctagccagctacaaagccagaccatgcccaccactgccatgcttgcaaaacgggtcaccacggcctgtaggtgagcagttgtgtaggagaaaagaatccaatttttttgtgtgctctttactattatgtagacagctccgtcttcagcccacactttggttccctgtggatttcagtttgtgtcctgtgtctgaggacagcggactgaatacagtgattttttacctccaataaatgtcatcccgctgcccttcctgtgcctcgagggttgtctgtttttctctttctttttctttctttctctttctttctttcttgcttacttttctttctttccttccttccttccttttctttctttcttgtctccttccttccttccttaactccttctttctttttgacagagtcttgctctgtcactcaggctgaagtgcagtggcattatcccagctcactgcaacctccaccttccaggttcaagcgattctcctgcctcagcctcccgagtagctgggattacaggcgctcgccaccacgcccagctaattttttgcatttttagtagagacggggtttctccatggtgcccaggattgtcttgatctcttgacctcgtgatctgcctacctcggcctcccaaagtgctgggattacaggtgtgagccaccgcacccggccctgtttttcactttctttttttttttttccacaggattaaaattatttattgaatagacatttatggagcatctattataacaggaaaaagtaccaggccctgaagacacaagaataaaatcaagcgtttacaacttacaaaaggagaaagacaagtacaccacagtgtacagcaatatttatagtactgacataaagtagtcatagatatggtgttcgggggagcagtgaaggacaaggaccaggacagggaactccattttgagcagagtattaaaagatgactaggataaaatcttaaagaaacgatatgctatgcattccatgaaaacaaaacgaaaaacaccagtgtgctctgcctatcaggattcaagctgccttgtaaatattactaattattcatattaggaacacactagtcaactccattaaaaagccactttccatccctgcataatggtagctctatgaatttgtgattcagaccatattccctcaaacaaatgcattactaaactttgactagacatcagaattgttaaacaataacaaaataaaattgaacaactgaataaagctgaagccctgaacagcctaactggaaaaggagaagaccctttaattggtcatatacacctcttgacctgtatttggcaatctgctctccgaccgtcaacagataagcagcacagccctcaaggttggagactgatctttggtaaagcaggcatccatcccagatgctgctgtctcccgtacacagccctcagagccaagggaggcctggaacctgagaagtttatttccaattaggacagttgcctatacttctcattcgaagcatccagagacaagggccagcccaacccccaatgccaggagccaaggcagcattatcttctgtatgagttcctgacccagaggtgacctgcacgatttcttctgtgtccgctgagggccatggaagaattttctcagctcggctattatgtaaactctaatcttaccagtggcaacatggcaaccacaaatcccaagtcccaggaggattatacttaatggagagaactcactggtctattgggactattggcactgcaaaaatgccataaagagctatttatgacaaacccacagccaatatcatactgaatgggcaaaaactggaagcattccctttgaaaactggcacaggacagggatgccctctctcaccactcctattcaacatagtgttggaagttctggccagggcaatcaggcaggagaaagaaataaggggtattcgattaggaaaaaaggaagtcaaattgtccctttttgcagatgacatgattgtaaatttagaaaaccccattgtctcagcccaaaatctccttaagctgataagcaacttcagcaaagtctcaggatacaaaatcaatgtgcaaaaatcacaagcattcttatacaccaataacagacaaacagagagccaaatcatgagtgaactcccattcacaattgcttcaaagagaataaaatacctaggaatccaacttataagggatatgaaggacctcttcaaggagaactacaaaccactgctcaacgaaataaaagaggacacaaacaaatggaagaacattccatgctcatggataggaagaatcaatatcatgaaaatggccataccgcccaaggtgatttatagattcaatgccatccccatcaagctaccaatgactttcttcacataattggaaaaaaagtactttaaagttcatacggaaccaaaaaagagccctcattgccaagacaatcctaagccaaaagaacaaagatggaggcatcacactacctgacttcaaactatactacagggctacagtaaccaaaacagcattatactggtaccaaaacagagatatagaccaatggaacagaacagagccctgagaaataataccacacatctacaaccatctgatctttgacaaacctgacaaaaacaagaaatggggaaaggattccctgtttaataaatggtgctgggaaaactggctagccttatgtagaaagctgaaactggatccattccttacaccttatacaaaaattaattcaagatggattaaagacttacatgttagacctaaaaccataaaaaccctagaagaaaacctaggcaataccattcaggacataggcatgggcaaggacttcatgtctaaaacaccaaaagcaatggcaacaaaagccaaaattgacaaatgggatcgaattaaactaaagagcttttgcacagcaaaagaaactaccatcagagtgaacaggcaacctaaagaatgggagaaaatttttgtaatctactcatctgacaaacagctaatatccagaatctacaaagaactcaaacaaatttacaagaaaaaaacaaacaaccccatcaacaagtgggcgaaggatatgaatagacagttctcaaaagaagacatttatgcagctaacagacacatgagaaaatgctcatcatcactggccatcagagaaatgcaaatcaaaaccacaatgagataccatctcacaccagttggaatggcgatcactaaaaagtcaggaaacaacaggtgctggagtggacgtggagaaataggaacacttttacactgtttgtgggactgtaaactggttcaaccattgtggaagacagtgtggcaatttctcaaggatctagaactagaaataccatttgacccagccatcccattactgggtatatacccaaaggattataaatcatgctgctataaaggcacatgcacacatatatttattgcagcactattcacaatagcaaatacttggaaccaaaccaagtgtccatcaatgatagactggattaagaaaatgtggcacatatacaccatggaatactatgtttttcactttcactgtggttgtttggcaactgaatccactcaatatgcaatagacaagacagagatcgagagaaggagaaatgagaagcccatgtgggagcagaggctgcaataggaaaggatgaagcctgtttttgtggatccccctcactcccctgatgaatcccttcttcagctactggtttaggcgactgctgatgaaacccagaagaggaagactgggtttgtccgtatgaggcccctctcatcaggctggaacttggtaactggctttcacttatttatttggagtctgaaaggaatcaacagctcttttgggaccaatggggcaaatggaacctacacaaaccaatcgcttgcagcaagccgtgttttatagatctataaatctataaaacatttacaaatgcaatgtttttaatatatttataaatatataaatttggattttccaaatcaggtgaagctctcctcagtccccacctgtataactaaagaaagatgtgtggctatgcaaagaagccaaacgtcattaccttcctgtagaattagggtttttgttaataatacttcgcaatttctaagaagttgtttgggatattacatgggttattaaaattctgtgtactgagttatttttcaatcatgaaggaaaaaaaaagtcaatccactgaacaagaatttaccaagcagtcatttcagggagttcccgttgaacctgtgattcggtagtgcactcccttgatcacagcagggacgtttaaagagaaagacattttggtctggattagctctaacgctagacactgaagttacaagaaatctgtatactgaatggcaaaggcgacttccagtacactccccgctgtctgggaagaggcatcctttgaccgttttagcaaatctgtttatgtgtctgtgcacgtgtgcacgtgcatgcctgtgtcaaaattgggagtgttgcttaggcagtgtaacgtttcacagttgtgtgcagcaaacaagctggtttttagaaactagcagccagcgtttcagggaggagggagagctgccacagggtcctccctgtgggttactatgaatgcactgtatattggagaatatctcgatccaaacaacagtcattcctgagtggtccttttgtatctggaattggttccttctggtgggttcttggtctcgctgacttcaagaatgaagctgcagaccctcgcggtgagtgttatagttcttaaagaatggtgtgtccagagtttgttccttcagatgttcagatgtgtccggagtttctttcttccagtgggttcgtggtctcgctgacttcaggagtgaatccgcagacctttgcagtgagtgttacagctcttaaagatggcacgtccggaattctttgttcctcccagtgggttcctggtctcgctggcttcaggagtgaagctgcagacctctgcagtgttacagctcataaaggtagtgcggacccaaacagcgagcagctgcaagatttattctgaacagtgaaagaacaaggattccacaacatggaaggggacctgagcgggttcctgctactgactagggtggccagtgtttattcccttctttggccccacccacatcctgctgattggtccattttacagagtgctgattggtccattttacagagtgctgattggtccattttacagagtgcttagtggtctgtttttacagagtgctgattggtgcatttacaaacctttagctagacacagagcactgattggtgcgtttttacagagtgctgactggtgcatttttacagagtgctgattggtgtgtttacaaacctttagctagagacagagtgctgattggtgcatttttacagagtgctgattggtgcgtttacaaacctttagctagacagaaaagttctccaagtccctactggacccaggaagtccggctcgcttcacctctcactttgttgctctcctgttttaattttattttgaaactcttgggtgcgtcagggtcttggtactgatttattgttgttgatccagccaaattagccatgtaaaaatagcacctgtgtaagagacgagcagcatcttggtagcctgatactttgggcagcttgatgctgatggtggtgtgtgggaagagaggggataccaatcacaagataggagaggagggcctggcccttgggcacctctgggaaagcgtagggaacacgaggcagccagcccctggcaggggagactgtgtgtgccgtggtgcggtgcaggcagcactcatgccgggaatggtcaggatggcaccagcttattggattttttgttggcatttatgtttgtctctgtactcaccacccaagtgataaaataggatccttggtgcggaacttaaaattatgccagaaagctagcagttctcctccttggggacttgtcttaaacttgcctggtttgtacgtttctggccggacacgtgaagaagcaatctgtgacaagtctgagggtcttcctttcaacctgcctcccacgcgaagaaaagtcggtgtttcccttctgggaactgttgtgaatttctctttatctgtgaactgttttggttttgtttttaattgctctgtactccctctgaatcaaggcttctaccactgccggtgaaaaccacaaagggatctgcttgaggcgccatcctggccaagagagcaaacctgcaggaggtttggaaatggactcagtctctgcaaaagcgtgtgcactattaggggatgaactgtgtcacagccaggggcacaaagctcgtgttgtaggtgatccaggagacgtgagttcccagagattgttttgtgcattcatttgcacactgttgtcggggttggacttgtgtttcaggcttcaatgtgaggctcgtgatatgcatgtcctgtttatcagtaaaaaaaagttatcaaagtggttgaatcctgtgacttggcaagtatgtgagaatccagtacacatgactcttcaacttcttcctttaatgtcacttttataggaaatagaagtaaccaatatgacagttctcaaaaaaataaaacaaaataaaaattaggtcctgagcaggaaaaccaaatgaaaaaagtggaaacagggcacctggaaatctaaggctttgctgtgcttttctgtatttcccaattttcccaacagtgagctttgatttttgtgtttttgtttgttttcttgcttgttttataaccaggtcaaaacaatgtaagcaaatataaaaataaataaataataaactaaaggaaacataaagtgagtgctgggtgagaggtgcctctgttcccctgattaaggcaccctttgtgccttggggcagctgcctggattcgacctggaccctctacttgctggcctgtgtggtgctgagcagcttacccgggctcctctgtgacctgggtagagccagccctcttgagagtcactctgaggcctgcagagacaggatgggtccagttcccagtgcatagcaggtgccagcaggtgtgttggtgtcaggtgtgttggcttcttagggcttccatatcaaattcccacaaacttggtgacttaaagccacagaaatttattctttgacgttatgaaggccaaatgtcccaagtcatggtgtcattgggctgtctccctcggaaagtgctgggaagactcttcctggcgtcttctagcttctgggggctgtggcagcaaaaccccaacctctgcctccgctgtcacgtggccttcctccctatgtgtgtcttgtgttcaatttcccttattgcattaggacaccagtcatggcacttagggcccacctcatacagtatgacctcctaatattagcttggctacatctgcaaagactatttccaaataaagccacagacatagatactgggagttaggacttgaacatatctctctgggggacaagattcaacccacaacaactccattatcaggatgatgagaccctctgatgtttcctgtgtccatctccagcccctccctctgtccctcctgagctgctgaatgtcatctccacaggacatcctggatactctcgaaaggccagcatgggaatccaacctcattgttcctatctcagccctgccccaaatcctagagagaaatggaaacatctcaatacactatcatacaaatatgttcacagcagctgtcttgataattgccacaaccaaaacagtatcaatgaataggaaaaaataagggaatgaattgtgatttgctcatacaatgcaatggtgtcctactcagcaataaagaggaaaagatactgacacacacagcatggatgaatctcaaaacatgcaatgcggccgggtgcggtggctcatgcctgtaatcccagcactttgggaggccgaggtgggtggatcacaaggtcaggagatcgagactatcctggccaacatggtgaaaccatgtctctactaaaaatacaaaaattagctgggtgtggtggcgtgcgcctgtagttccagctactcaggaggctgaggcaggagaatcacttgaactcgggaggtggaggctgcagtgagccgagatcacgccactgcactccagcctgggagacagagtgagactctgtcttcaacaacaacaacaacaacaacaacaacaacgcaacactgagtgaaaaacaaaagacacaagaatacacattgggtgatgccaattatatgaagttcaagggacatggaaaataatatctggtgataggaatcagaaagtggtggctctcagggctagggattgactgggaaggacaccaggatctttctggagtgaaggaaaatttctctatccttgattgagaagctggttacacaggggtgcatgtttggcaacactcatggcatggcacatgtaagagctgcgtgattcaactgaaaagctaacgctatttttaaatttcaaagaacaatgtgttagcctgttttcacactgctattaagaaatacctgagactgagtaatttataaatgaaagaggtgtaattgactcacagttccacatggcgggggaggcctcaggaaacttacaatcatggcggaaggggaaccaggcacatcttacatggtggcaggcaagagagaagagcaggggaaaccaccacttacaaaaccatcagatctcgtgataactcactcactatcagaacagcatgggggaaccacccccatgatcctatcacctcccaccaggtccctcccccaacacatggggattataattctgattacaattctagataagatttgggtggggacacagccaaaccatatcaaacaaacaacctgcaataaaaaaaaacgttttaaattgggggtaaacaaaataagtacagacccgccatacaggttgggcagggggtcccggccttcatctcctcagtgcacctgtcttgttcctgagactctaggccattgctgctccctcttttgtaaaagtcaatgccctcaaggaatttatttcctgaaaacttatggctaaggggtgcccagcctgctgattgcttgactcagtgctagatgagagaagagacctcagaatcggacaggctttaaattccagccctgtcctgagtagccgagtggccttgagagagacccagtgagatttccacacccggatacatcgtggaaccatcaaggcacaatgattagcacacccatctgtgcaaatatttatctgtttttgtgagaccatttaaaatcttcttttagctccttgaaaatattcaatgcaagctgggtgcggtggctcatgcctgaaatcccagcactttgggaggccaaggcaggcagatcacttgaggtcaggagtttgagactagcctggcccacttatagtgaaaccccgtctctactaaaaaatacaaaaattagctgggcgtggtgacacacgcctgtagtaccagctacttgggaagctgaggcaggagaatcgtttgaacccaggaggtggaggttgcagtgagcagagattgaaccactgcactccagcctgggcaacagagcgaaactccatctctcaaagaaaaaaaaatattcagtgcttgattctgtcatttgagagaacatggatgaacctaggggatatttttttgtgtaaaatgagccacacacagagaggcaagtaccacatgacctcatctctatgtggaatctaaaatagtcaacctcagagaggtcgagaggagaatggtgggtagtagaagctagaggcagggatgggtccctggtagccggggaaaggggagacattggtccaagttttggttagacaggaggagggagccctggtgacctactgcatagcatggggctctagagggttcttgttctatgagaatcagcctctgacttctttgctggaggggttgtgattcctcaaacaggcctgagtctctgcagtttctcgcttgtggatcttgatctccgagtattcactgtcagtggcctcctgtccctgcgggtcctgaggcttcactttatggaagctgagggttgcataatggagctctccttcctcccctgacgagggggcaacagctgggggaggcttcttcagggggttgccatctttccaggattcagtcaggggtccctggacagagagagagaagggagtcagaacagagcagtggggccaggatgaggcagggagagtccaggaaggaggcccaggaggtccgtcctccattcatcccacctgcatttttgtcgaagtgtctttcatgctttcctccaacatttaacacttactgagcacctgtttggtgtttactaatctcattaacttcccgcaacaactccatagtgagatattattattatctccactttataaatatgaaaactgaggtcgaaacagtcagcactgcgcccaaagtccctgttgcagcaggacccaatccatctgttccttctgaccccaaagcctggagtcctgctgaggcccccgtgtgtgaggccctgagccggtgctggataaactatgatggacatggtaggtgtgggccctgacctcctgcagctcagtttttgttttgttttgttttgttttttggttttttttttgagacagagtctggctctgttgcccaggctggagtgcagtggtgcaatcccagctcactgcaccctccacttcctgggctcaagggatcattccatctcagccccccaagtagctgggactgcaggaactcaccaccatgcctggttaagttttgcatttttttgtagagatgggatctcattatgttgcccaggctggtctcaaactcctgggctcaagcgatcctcctaccttggcctcccaaagtggcagctcagtctttaattgagggaggtggcaacaaatgactgttaaagaaatgaatatcagcttgggtgcggtggctcatgcccctaatcctaacactttgggaggctgaggcgggcggatcacgaggtcaggagttcgagaccagctggccgacatggtgaaaccccgtctctactaaaaatacaaaaattagcctggcttggtggcgcgtgcctgtaatcctggctacttgggaggctgaggcaggagaattgcttgaacctgggaggcagaggttgcagtgagccgagattgccccactgcactccagcctaggtgacagagcaagattctgcctcgagaaaaaaataaaaataagaaatgagtatctacatgtaaattatgatacaacgggcaaaacgagagtaaatgagagagaattacagggccttaattgagacatgatacctgacctggggaagctcacaggttagtggcgtaaggatgacaagccggtcaaagaaatcaggtcccgccaataggaaaaataatgagaggggtcaggatggctggggccagggagaagagatgccagctattcttggggaggaaaaatggaggagagatggtgaatcggggctatagagaagaaaaggaggacagagaggagataactcctactcagtgcctggcctgggaaaaattgggggtagggactgccatgctgtcagcaagatgggggagtcctgtagaagccggcctgtgggaaggaggaggagacgaggaagtgactttggccataccaaagagagcgatcctgggggccatcctgtcagaggtgtccaggctggatgctcggtgtggagaagcccacatcactcacctgagaggccgagcccctgatggcctttgcatcttccatgcctgtatcccccacgcccgctgctggccttgccgatttcttcctgcaggacctcactctgagtgaagagaccagagagcctttcagtgtggtcagatcggggtgcagtgggcagaccaacccctgccctgtatttcctactgggggcttgaggggtgaccgaggcgcaacggcggtggtccagttccagagaccccaacggtgaaaacagaggctcctgcctcatggatggtggggcccgaggttgctacagatgtggagccccacagacaaggacgctcgtgaaatgctcaccgtgcacccgtgagctcattcttgccccaagccctggacccatccaggtccttccagctctggcttcagggattctgttcccggtctgccctgccccaggtctctctctccctccccagggtcaatgctcacatgatgaagatgatgcagaaggacaggaaggccagggctgtggctccagctcccccgactgctgccagtgtcacttgtgatacaggtcttgaggtgcctgcagatggattggagttgctttggggatttatatcacggagaagtgggtctcttcccctcccactgtctgcagggccctagacttccattcccctcttctccttcccagacacagaatacgaatgggagggaggaaaggagactacttctgaggccagtgaggcatgagagtgctggatgcagcttgtcttgcctttatttacaattttgatattgtgttcttgtggaatcattttgcattcaattttagttttttcaaaagatcatggcattgcaatattactttacttgctttctgagttgggtttttctttggcttcttaaatttggtgccaaggcaagtgcctcatgtgcctcatcctagtctaagcactgcaaagcaaggcgcttgtccctccaaacacacctggccgggccccagctcctcccctccaagacccactcctcccctctccccaccccgcacccctttcctggcggggagaggacagtgatgctctgggtcgcagggaagttccaggcctcacagctgagcacagaccagagctgagctcccccttgaagctcaggggcagtgggtggtccatgagggtggggcaggtgtgttctcctcctccagcccctcccttacccacctgtgccctcattctgcagggagaggctcagggaaatgtgctgggagccctgagcgttctgagctcggcaggtgaattccccttcatccctcacgtgcactcgaggcagctccagcagcccagggtttgaggaccgtgaggggcacagggtcaggctcccccgggtccagctcagcctggcagggggattgctgttgacagcacagaccaggcgcagagactggccctcaaggactgaaagagatgagccatttcccagggctgtggatgctgcagagaaagagacagagggtcatcccattactgggtatatacccaaaggattataaatcatgctgctataaagacacatgcacatgtatgtttattgtggcactattcacaatagcaaagacttggaaccagcccaaatgtccaacaatgatagactggattaagaaaatgtggcacatatacaccatggaatactatgcagccacaaaaaatgatgagttcatgtcctttgtagggacatggatgaagctggaaaccatcattctcagcaaactattgcaaggacaaaaaaacaaacaccgcatgttctcactcataagtgggaactgaacaatgagaacacatggacacaggaaggggaacatcacacaccggggactgttgtggggtggggggagggatagcattaggagatatacctaatgctaaatgacaagttactgggggcagcacaccaacatggcacatgtatacatatgtaacaaacctgcacgttgtgcacatgtatcctaaaacttaaagtataataataataataataataaaaggagacagagggtcagagagacaaatggatccagagaaagaggaaggacacagaaagagactagtgagagggactgacacacagacatagactgaagtgcaggaaaacgcacactcagtgctgggaatgtaaacttgtccacttttaattgagaacaacttcactgcatctttcaaaattagaaacaacatacgacactggtatattttgcttttaggaatttatcccatacacttagatattcctgtggaagtagatacaagactatccactgcacagtttctgcggaaggatatttgtgccatgattttccttaagggatgccacaaagtcagagtccatctgtgcagtgaaatcacacacggtcctagaggacggggtggacagtctcactacgatgtcaaaccacctctgagatcctccaggtgcacaaaccaagactcagggcagcctggacggacgctggtcagttccgtggagggggatgggcactggaggacagactttgctgtgcattttgaatttctgcccatgtgactgtatcatctgggcagaagtacttagatcgaaactactgggaaaacagaaagatcagacagaggaagtattcaggagatgcctgacaagaaacttgaaagtctggtcccaaaataaaaacgaacaaaaaccaaaaaaattgggagtctgatccagctgtgtgaatgtcaccctgtccttgctgtggggccaaggaaggggtgtgtggaggagtctaaggggagcagggacaggatggggacaggggctcagatggtcacgcgggctggagatgtgggctcttgtgccctgggctcacgcacagtggcagctctgtttcccaaagtgattccaggatgaggagagacccagccccatcctgagctgaaggccctgctcccccaaccccagggagggggctctgtcctacctgtggcatctccttggaagacagtcatggtcaagttccaaggagggtctgggacagaaagacatgaagacccacattactataaggactggggacattggccctgtcttcccaggagctgcaaatacagggaaaatggagtcggcattctcctgaccccactcccagcccagattctgggacccagaacccagtgtccaggcttgaaccccatcccctgccctcaggaacacctcccaacccatgagggacctgggcatcttggtccagcactcacaggacacatcgaggcggacggtactggtcgtggtcacacctgtcccaggcaaggtcacctgacaggtgaggctggtgccgtggtcctggggctttggggtaagggtgagcactgaggagcgggcagtagtggggcccggggaggacacggaggccccaatccaggagatcatggggggtgtcccctgcttacaggcccagggcacagagcaggtcaggttcctggagtggccagactctagggtccctaggatgaggatgtcaggcctatgggtcagggctggtgaagatggggacacaggatcaggaggaggtatttcaggtgcagccctggaggaagctcaagctctggtccagctcctccccggagaccgacttatttcaatcccaaccccctcccaggccccatcccagccctgcctttcagcccctcatgaccttcccctgtggcctgtgctggagcccgtgccttacctgtcacaaacacagacagctgcttagttttgtaattcaactgtgatttgtaactccatttcatgcttcctctctctagccgaaagaaatatgaccccttatccctcttcctggcgtctctgatgctcagggagcagtcgttgctccaaatgtccccaaggagttggaatcggccctgggtctctgcctgcacttctctgtctgggttgtttgtggccactggagcgtcttggtatggtctgtctcctgcccggaaccagtagccatgaactgggtcagagtcagtccagccatcctgggggtaggagaaggagcagggcacatggacacacaggccctcctgcaccgtcaccagctcctgcacttgcagcaagtaaccatccccatattgtctgtctccctccatcccctttgtcccccagagcaggggcagcagcagcagcagcagcagcatgtctgggtttgaaggcgccagggccgccagggaacgtctgttcctcagggttcttctctcagaaactgaggtctcaagacttaggggaggtcccgcaggaggttgggggtgaagtcagaaaagtgacctcctcagaggaggaacttcacacacagacactgtcagggccgggtcagtcctgggagatccactgtccaccaccccatttccactcctgggaaccctgaggccagagagggtgagaaactcatccagattcccaccctatgcagggcccaacctctttcttgcttcccggacttgcccttccatttgggtaacattttctgcaaggtgaaattgggtcccatctggccagacccctgaatcacccccggggctgtcactgtttgtggaggtcataccagccaaaggtggaactcagggccatgagagactggggtgcaggtgaggtgagcaggcagcctctcctccctctctcagcagcaacgaagtgggcacctcctctttacacaacgaggtcaacagagcagagccagacactgtcctcaaggagtcactgtgcagaggggagacacggaggctcctgacgtctgagctccccaggacgggagcttcagtggggggcacaggcaaggtggggtcgttctcccctaggtcaggggttcagtctcaggaggcctgagcagagggacacggggctgtggaggtgaggattctgcatgttgatacacacgaaggacggggggcggggggaagcctggctcgcaggaggcctgggaaactgaggctgtaactgttgtactgtggggtttggaagggagaaatgtcagaagggaaagggtcaatttgaaaagggcacacacttctccctttgttgcagctatctgggtatcagaatgggtttcttcaccacccgtatcttactcagccacacttcccctggttactgcacagcaggcggggtctgtcagccctggggctttgctcctgcaggctctgcttccaggggtccaggtgaacaggtgtcatggaacgaggacaccagccctggggtgtgcaccttcagcgatgggcaggatttcttgagagaagaaatgtgcacctgaattcaacagatgatgatgatgatgatgatgatgatgatgattattattattattattattattattatttgagacggagtctctctctgtcgccaggctggagtgcagtggcgcgatcccggctcactgcaacctctgactccctggttcaagcgattctcctgcctcagcctcccaagtagctaggattacaggcatacgccaccacatccagctaatttttgtatttttagtagagccggggtttcaccatgtcgaccaggatggtctggatctcctgacctcatgatccacccacctcagcctcccaaagtgctgggattacaggtgtgagccaccgtgcctggcctcaacagattattttaaactgtgtggctgggggctgggaagaagttaagggggatcctgggaggcggagcctccttagactcaggtcaattttcttgaaacattttttggggggtaaatataagaaatatagataaaaacaacccccaaagaagacctcagtgatttacatacaacgagccccctcctagaaatggcacattgacaaagtccccagcgctgctcatttgtttctccttcttattggccacaccccactccctcccaaacgatcccctagcctcactttggtgcaaattgcctcaatgcttttctatatagttttattatctgagcaggctgcatttactaagcttttgcacgtttttctgaagactttgtatacacagaaaatcaaactctactttcttccactcagcttcatggatctgcccgtctcctatcttcccctcattacttataacctggagtagatcattcggctgtgataattgagaagggaaggtgcagggcttgggtgtgcatagccgactcccacccccatcaccaatgcttgcatttgtagctggtatctcattctgcagccatttccccctcctgggcctcctatccttgcccagtagagacagctgcagtatctcaatagtcagaagggccgagccatggcacaggtcttttccatggtccccaagtggtaattgaagccttcagtgaagactcctgtgcaggccttgctctccagcaacttagccaggctggaactacaattcccagaatccccttccctgtttgcttcctggacaaagttcaccacaagggaagggggaagttggagcagcagccctgaggggtccgtgtaggggcaggagctgttgcagctctcacatattgacgctgaccactggcccatctcatagggagacacgatagccgctcacttgttcacctgctggacggcaaggagggcgtgtgggacaccacgggctatgccttagggagcagagaatcattgaatcctgacatggggattggtgacccacatggacacaggtggcccagagagacacatacagtgacaggcaagggatccataaaatggcatcccaaatagttctctcatcctaagacgatgtcccagggtctctttgacctgacaactagcgccattcaccttttcaggggagacccagcttcccagggcaaagggaaggacacagcgcatctcagtacccagaatgcccaatgcttgggtgtgtgtgtgtgtgtgtgtgtgtgtgtgtgtgtgtgtgtgattgagagagagagagagacagagagagagagaccctgtgtgtgagggagagggagtgtctgtgtgtacctgtgtgtttctgtgtatgagctgagcactgcctccttgggcagtgtgacagttaatttgatgtgtcagcttcactgccctgggaacccccattcgtgtgtcctttcataacctcattccttacccttcacatgcacatagagcatttctgtaattacattcacatagatctcccttttctccctaaagaggtctgtccctgcatctcgcctctgtgtgtctctgacgtccagaaagcaggtgctggcctggggtctgaagcaggtggaattggctctgggtctcctcctgctcttttccaactagattgcttccagccacttgaggatcctgatggaaatgtcccctttctgggacagtagccttggacagggctggagtcagacaggtacccacaggggtggaagatggagcagtgcgtagtcacagaaaccctcctgcacctgcaccaactctggggcttcctgccgggatctcatatcctgagccagatcccctgtggggaaatgagggtcagcccagcccagccccatggttcctctccctgaggcccattctcctgcccacagcaggggcagcagctattgcagcgtgagcttctttagggtgagccttggtgtcgcagggccctagaagggccccacaggaagcctgggggtaagatcagaaaaataactgaccacaaaagaggaccttggccccgacactgccagagctgtcagggctcctggggagtggccatttctactctccggatgggtcttcagtgtgggccacacacagcagggaggccccgacccacagctgcaggctctctgcccacagcctttccctcccacagcactgtccacaccagggaagcaggcactgcctgtccattacagcttctaggtgctcgggagggtcagtcctgccagagctgggactcaggaggggctggcggaggaaccacgaggcatgagagatggggaggggtcccccgaggcgggagaggtgatgtttaatgaatgagcacaatcaccacatcaggagcatctcctcctttcagggggatggaggcaaaggggagagtgtgacagactctgtctccttccttgggaagttccctaatgaacgagggggcagaggagccctgggccaccccagctcctgttagtaagggctgtgatgcttgaaacacaggcagggcttgtggaaccccgagggccctgtgcagctagaaggtgcggtctcaggtatactcgggcagagtggacgggaccaggactctgaggtgctgtgagcatgcggccccacaggtggtccccagccttcctaaccttctcagtgccccctgcccagcatgcctggtggtgactgcacagccgaggccctgtgagcccagcatggggagcaaggctgagcccaagatgctaggggaggccctggctctggagtgtgagggtcctgggccctctccctccaagtctcagtctcctcatctgtcccctggagggatcacagcacccacccctcagcctgagggagaacccagctcgaggaggcgacgttctctgcagactcaggcatggccaacatgctctgtgtccctgggcaggcccgaagcatccacgtgtctggccctaaccattctcaggggtcactcggagtcctgccctcagtaaggagctcctggtggtccacactgctctggggcttcctcagctgaggcctcacagagagagttcaggggtacaggctctgtagctggatggctgctggcttgagctgggctctgtaaaacccacggtgctgtcttgggagggggcttacctgcactgtgcatcgtcggatgtcaacacttacggggtgtcagggatgaactgtgtcccctacaaattcctatgctgaagtcctaacccccagcacctcagaaagtgaccatatttggagacgaggacttataaaaaggtgactaagttaaaatgaagttgttagctctcatcctacatgagctgtgtctttattagaaggggtgattaggggtggagtgtggtggctcaggcctgtaatcccagcacttccggagaccgacacgggcagatgacttgaggtcaggagttggagaccagcttgaccagcatggtgaaaccccgtctctactaaaaatacaaaaattatccagacgtggtggcatgtgcctgtaatcccagctactccagatgctgaggcggaagaattgcttgaacccgggagacggtggctgccgtgagccaaaatggtgccactgcactccagcctgggcgacagagtgaggctctgtctcaaaaaaaaaaaaaaaaaaaaaaaaaaggtgtgattaggacagcgacatactcgggagaaagaccacgtgggacacagggagaagatgccacccgcaagccaccgagaggcctcagaaggaagcaacgctgaccacagcttggtctcagacttccagcctccagaagggtgggaaaacaaaggcgttggtgaagccactcggtctgtgttcctttctcaaggcggccctggcaagagagtccatggagtggtcgagaggattcgatgtgttcctgtgagcacagcccggtgtggaccgcggtggatgcagagtcccacaggggtctgggacagcctgtaacatgggatgctcagaggatggaaggagaaaagggaagggaagggctcctcaccagaggaaacctgtgctgctgccgccctgtctctgacatctgcagggctgccccctccacccacactctccctccctccccaggaccgggcagggctctcagccgcagcccctcgctgcccctgcaccctgggcagttgcctcccatctatggggcggagccgcctgggcgtctgggctgggcgaggcggagcctggaggggcaccggccacgggcaggggagacagaggcgggcacagcctggcggggtccgggctgagccagcggggaggacggggctgtgggagcccagcggagagggtgaggatccgcgggcaggtgggacaggtgagctgggaggtgagagatgggcagggctgcctgaaaggcaagttcatcccagagcagcgagcagggcgcagccaaaggccgtgggggaaacagcggcgagaaaaaaacggccaaaattctgcccgcagtgcgcctgtatcctagtgcggcggccacaaaaatattgttgagtagcaagaagtgtttcgaaagtgtgcagtgggtaaagtgtgagaaaataaagccgatttcatcgagaaaaagagagacagagagagaaagggcccatatcaacccaaagtcattactcttcatcacgattatattgcatttttcccatctactacagcgttaacttcatataaactttatgaagacataccttacgtataataaaaagcacacattgtaagcatacagttaaattagttttggcaaatgtaaacaccctgtaactatgtcctcaatcaagatagggaatctttttttcatccctccaagctttcttattttctttcttttctttttttttttttttttttttttgagacggagtctcgctctgtcgcccaggctggagtgcagtggcgcgatctcggctcactgccagctctgcctcccgggttcacgccattctcctgcctcagcctcccgagtagctgggactacaggcgcccgccaccacgcctggctaatttttgtattttttagtagagacggggtttcaccttgttagccaggatggtctcgatctcctgacctcgtgatccacccgcctcggcctcccaaagtggtgggattacaggcgtgagccaccgcgcctggcgctttcttattttctatcccagtcagtgtttcacttgcagccatcacttacgtgattctcatcactatctattagttttttctattctggagcttcatataaattgactcacacaatatttatgtatctggcttctatcagtttgttaaagacgtgtatacgttaaatgtatatgcacccaataacagagcatcgtttatcaaaatgtcaagtatcttacctgactatagttgaaaacaactcaaaaccagtaacaagaggaacattagaaactacacaaatatattaaaattaaacgacatgcttctgaacaaccaatgagtgaagaacaaagctaaaattgaaatttaaaaattcattgaacaaattaaaatagaaacacaacatgccaaaaactataggacagagaaaattaagtattaagaggtaagtttatagcaataaatgtttacaggaaagactagaaagatttcaaataaacaacaatgcatctcaagaaactagaaaagcaagaacaaagcaaacccaaaattagtagaaaaaaagaaataatagggccgggcgcggtggctcatgcctgtaatcccagcactttgggaggctgaggagggtagatcacctgaggtcgggagtttgagaccagcctgaccaacttggagaaaccccacctctactaaaaatacagaattagctgggtgtggtggcgcatacctgtaatcccaactactcgggagactgaggcaggagaattgcttaaacccaggaggcagaggttgcggtgagccaagattgcaccatgacactttagcctgggcaacaagagcaaaactctgtctcacaaaaaaaaaaaaaaagaaaagaaagaaagaaataataaagaacagagcacaaatcaaattgagacaaaataatacaaaagatcaacaaaacacgaagttggattttttaaaaggtaaacaaaaccaacaagccatcagctagagtaactaggaaaaaaagagggaagacgaaaataaataaaatcagaaatgaaaaagatgtcacaacggataccacagaaatacaaaagatcatgaaagaatatatgaactatatgccaataaatttgaagacctagaagaaactgataaattcctcgacatatagaatctgctaagattgaaacaggaagaaacagaaaacctgaacatatcaatgacatgcaacaagattgaatcagtaataaacctcccaacaaagaaagaacaggactagatggcttccctgctgatttctagtgaacatttaaagaattaacataaattcttctcaaaatgttcaagaaaaattgaagcagagggaacttgtcctatatccttctgtgaggccagcataatcctgataccaaaaatagacaaggacacaacacaaaagaaaaactacgggcaaataaccctgataaatatagacatagaaatctccaaaaaaatactaacaaaccaaatccagcaaaacaccaaaaagataatgtaccataatcaaatgggatttatcccaggaatgttaaggatggttcaacatatgtaaatcaataaacatgatacattatgtcaacagaatgaaggacgaaacctataagatcatctcaattgttgtagaaaatgggtctgataaaattcaacattctttcatgataaaatctctcaataaattagttatgaaagtaaagtaactcaaccccaaaaagaccacatagaaaaacccatagctaacatcatagtaaatggagtagtgtaggaagcttttcctctaagaagtggaacaagacaaatatatccactctcaccactcttattcaacatagtactgaaagttccagccagtgcaattacacaagaggaaaaacaaaaaccaaaacaacaaggatcatccggatttggaaggaggaagtcaaattgtctctgtttgcagataaacatgatcttacctatagaaaaacctaaagactaccaaaaaactcttagcattgataaacgaattcagcaaatttgcaggatacaaaatcaacatacaaaaatgagtagtgttgctatacgccaacaaaaaattagctaataaagaaatcaagaaagcatcccatttacaatacctataagcaatgaaatacttaggaacatgtttaatcaaagaggtgaacgagctctgcaaggaaagctacaaaacactgatggaagaaactgagcaggatacaaacaaatggagtagaattaatattgttaaaatgaccatgccattcaaagtaatctacagattcaatgtgatctctatgaaaatatcaatgacattcttcacagaaatagaaaaaagtcttaaaatttgtatggaactgcaaaagacctgaatatccaaagcaatcctgagcaaaaagaacaaagctggaggcatcacacgatcagacttcaaaatataccacaaagctgtggcaacccagacgcatgatactggcataaaaaccagtacacaggcaaatggaacataatagagaacccataaattaattcatgttatccactgccaactgatttttacaaaaatgccaagaacactcattagggaaaggacggtttcttcaatatggtgctgggaaaattacccatacgcaaaagaatgaaactacatctccacctttcaccctacatacaaatcagctcataatggatcaaatagctaaattaaagaacccaaactctaaaactactgtaagaaaacacaggggcaatgcttcaggtcatttgtctaggaaaagattttataaataagaccgcaaaagcacaggtaacaaaagcaaaaataaacaaatgacattctgtcaaactacaacacttctgcacagcgaaggaatcaatcaacggagtgaaaaggcaacctacaaaatgggagaaaatatttgcaaactattcatctgtcaggggattaatatccaaactatacaaggaactcaaacacctcaacagccaaaacccccctacaaacaatccagtaacagctgcatgtagagaggtgccctcctatctgatctatctcctagggagacactagttgtcaggttttgtggaacctcttggacaggaagagaggacttccttcagttggaggtggggaggagataagggtaagcatttcctcctactcctcctagaagccgaaggcatgcagaagggacagggcttgtgtccttcctgttcccctgctcagccagtcctccaggatatcaagtgtcctcagctccagctgtcctgtccccaccacaccctcaggaacccaggcatcctggcccagcactcataggagacattgagctggatggttctctctgcagtcacaccagctctgagaaacttcacctgacaggtcaggttggtgccatggtcctggagccttgaggtgattgtgaacgccaaggaatgggtggtcctggggctcagagaagtgggggcagctgacatccaggaaatgataagggggtgtctcctgcttataggcccagcgcacagatcaggtcaggtttcagaggtggctggactctagggtctccaggatgagaatgttgggtatatgagtcagggttagtgaggagatggggggcatgcaggatcaaaagggtaggtccaaggtgaagccctgggggaagctcaggctctggtctagctcctcccccaaacccccggcatgctttatgcccaactccctcccaggacagggaccccatcccagccctaccctgccctgcagcccctttgactttcccctgtggtcagtcctggagctggtttcttaccagtcacacacaaagagaactggggagattataacctgtatttggtacttcctctctccacctgaaagaaatgtgaaccattgttcacctccttctggcatctatgatactctgggagcagttgttcctctggggattcctgaagaggcagaaaaggcccagggtctcctccttcatttttcaatttgggttgtttgtgggctctgaagtgtcccagaattccttgcctccttcccggaaccagtagtcatgaacagagttattcgtgtagtagggtggagataggagaatgagcaaggcatgagggtgcacagacactcctgtacagtcacagactcctgcacttccagctagaaaactgcatcctgagccagggctccagtggagaaacgagggtcagctcagttcagccccagagtccctctccccatggcccactcacctatccactgcaggggcagcagcgtctcttaggcagagggttcctggactccctgtgtaatgagagaaggggaagggattggaggggaaggtttgagggcccattggaggctgaggagaagcaggaggacttggcggttcacagaagaaaaacctcagacctacacgtggtcagagctcatcccctctgcacagagcagagggagactccagagacctccccagaggggagcaaataaggagcagagatcttatatttcctctcatctgagagcttccctccaccaccagagcctggactaggatctctggggacatctgaggcatgggacactcatgagggtctaaggttctcccaccctgaggtgcttttttgtgcaccaccgtttatacctgggaacatgtcactcctggtctggtcccagagagtcacaacctcatctagagtcatgaggaagtcagtcctgcaggatggaggattctgtaggttctgtgggagtgtctgggacagtgaaaagaagaagggtcctgggtgcagtgtgggtggtagccattcactcattcatacattcattcattcaccaaacacacagtgagcatctgtgtgtcagtggggctggagaaaagatgccagggacctggtccccacccttgagatggcccccacccatagcctcatgtcctcaccatacacacacacacacacacacacacacacactggctttagagctgtggacactggtgaatttgccgtatgtcatggtagaattctaggtggttttttttgagactgagtctcgctctgtcgctcatgctggagtgcagtggtgcaatcttagctcactgcaacctctgcctcctgggttcaagtgattctcctgcctcagcctcctgagtagctcctgagtagctgggattacaggtgtctgccaccacacccagctaatttttgtatttttttttaagtagaaatggggtttcaccatgttggtcaggctcgtctcgaactcctgacctcatgatccacctgcctcggcctaccaaagtgctgggaccacaggcatgagccaccacgcccggccaatactaggtattttaaaaaaacttgagtactgaatttttttccctgacaactggtatgctgatttacaaaatttgaatgacatcttcagaataagaaccatgcaggatcttcttgtaaaccaaaaggaaggacacatattctatggactgcagtgcagaagaaacttcttttccatggatgttgccattctgtgtagtgtggacagaagtgatttatttgaggtcctcttcatagagattagcatttcctttcatgtaaaaatatgctgctcacagttaaatgaggctcataagacataatattttcagacaacatgagtatacagacaaaattaaaattttaggttccatttttcatgtttatggctatttgtatttttcttttcttttttctttacttttttttttttttttttttttgagatgaagttttgctcttgttgcccaggctggagtgcaatggcacgatctcggctcaccacaacctctgcatcccaggttcaagcaattctcctgcctcagcctcctgagtagctgggattacaagcatgcgccaccatgcctggctaattttgtatttttagtagagacagggtttctccatgttggtcaggctggtctcgaactcccgacctcaggtgatccgcccacctcgtcctcccaaagtgctaggactacaggtgtgagccaccgcgtccggtctctatttttctttcatgagttgcttgtttgggcattgacatgcatttataattgtcttgttggaatttagtttttctggtgtttcctaatcctcttcctccctcttgtctatgaagagtctcagacaatgtggtcatgctgttctcttatctgaggatttggaaatttgcctcgctaaatcatatgacacatatctgactatacccgggtgtgaccttcctgacagtcacacagttaaatgtcctggccaatacctttaagtttcaaaataaataaataaataaaaatcaaaataaaaaacttaatggataaaaagcaattttaggttcagctacgtgattttccatctcactctgtatcgtatgcatccaacgaactcttgaaatctaggacataatactatttggcaccatatattagtaaaatatttattacagtattatctagataaatgctcatttgtccttattaacatggagagctatttgtatcttcacttactatataaataattgaggttttaataagtaatataataccttgttgtaagttattttaaagttaagaatatggcttggattccttggattcattcactcggtgtaatgcatttgagactcagctatgtgattgggtatatatatgaataatttgtttttgtttttaaattgctgactcatacttcattgttttccacagatcccccattttgtatatattcactgtttgacagatactcagaatgtttccaggttttggtgaatataatataaagctagtacaaatattcccatgcagatttctgtgtgtggacactagtttttttttctcttgcataaatacctaggagttgggtgcttagtcacatgtgtaagttataagaaatcgcagctgggtgcggtggctcacgcctgtaatcccagaactttgggaggctgaggcgggtggatcatttgaggtcaggagttcaagaccagcctggccaacatggcgagaccccatctctactaaaaatacaaaaattagctaggtgtggtgggtgcctgctatcccagctactcaggagactgaggcaggtgaatcgcttgaaactgggagacggaggctgcagtgagccgagatcgtgccactgcacttcagcctgggcgacacagtgagactctgtctaaaaaaagaaaaagaaaaagaaattgtcaaagtgttctccaaagtgtgagtgccacttcatatccccaccagcaaaacatgtgagttctggttgctctacattctcattaatatttggtattatcaggaatgtgtaaaatttatttttcttttggtttggttttgtagccattctaataggtatgtactgccacctcattctagttctaatccacgatttcataagagcaaatggcgttgggaatgtttccattcatgtgattatttgccatgagtttttcttctttgatgaggaggctgatcaaatctttagtgctttttaaaatccgtcttaaaatacacataacaaaaattaccattttaatcatttttcagtgcacaggtaagtggcattaagtactttcacactcttatgcaattatcaaccattgatctccagaaatgtcttcatcttgccaaattgaaactctgtacccactgaaagataactccctattccgtcctgctcccagcccacggcagccaactttctactttctgtctatgaatttgcctattctagatacctcctataagtggaatcatacagtattggtaacttttgtgactggctaatttcatgtggcatagtgtctccaagcttcatctaagttgcaacacgtgtcagaatctccttctttttaaggtatttcattgtatgtatataatatagaggcttttgaccagtgtagctcatcctgaattatcgagttgatccttaaatccaatcagaagtgtcttgctgggagaggaacagatggagatttgatgtacacagaaggcggcggtgtctgggcaaacccatcacctcaaatgcatctcaccaccagggggagccatagagttgtgcgatgcatccaccctaatctttgtacaacctcctgtggataggagtaagaagtggatagagagggtgagaggcaggagcctccagtcagcttccaaagatgggagtgagatggaaaataacaagaatgacattaacaataacaataacattacaaataacattaagttataacagctacctcttgtggcaaaaaccagagtagggggctgtgagaaacccaccttatgtacagcgcctcagagatcccaacttaacattttttgtgatctccaagatagatagacaggaaggagtggctgttcattagcattcgctctggctgtgccaggcagaactttgccctgggagggactatgacgttctgctctcttaataaaaaggtacaaagctgggctccagaaatagactgaggggcctcttgggtctgctccccaggctgcttcctgtccataggtgagcagtggatgctgccactcctgactggagagacagggtttcagaagaaattctccaagttatgggggatcccggatgggatgggtcaggtctagctctggggtctgcttaagggaatgagagtgagtctttgaagctcaaggcaccctccaaacctgcactcctctcctaacagcagggtcctcatgagggtgtcgttgcatgagacagtaagggtcatgccatgggctctgaatgaaaccagttctgccatcttcatcctgattgttcagactaggcatcactgaccatgcacagtctagatggagggaggtacatgtttcttcagggacatggcacaatgctgtgtctaaaaggaatgcttcatgttggtgcagccaaatggagctgatcggacgctctctgtggctgtggttgctggtctcctctcagtatccactctctctttttccttagtaataaggacctcagacatgagaacccagctaagaaggattctacgttctacactttcttctgtagttttttctgaacagccctatgaagaggaaacattttacatccctattaaaaacaatttctttttctttttaatttttgtgggtacatagtagttgtagaccctaagattcttttaaatttatttaaattttttatttcttaacctttattttaggttcggggtacacgtgcagatttgttatataggtaaacttgtgtcatggaagttttttgtacagattatttcattacccaggtactatgcctagtacccaatagctattttttctgctcctctccctcctcttactgtccaccctcaaggaggccccagtgtctgatgttcccctctatgtgtccaagtgttctcctcttttaactgccacttataagtgagaacatgcggcattggttttctgtttctgtgttaattttctaaggtaatgtccccattttacaggtgtagaaagcaaagcttagcggagataggaaacttaactgagatcacgtggcaggtaagtggcagcattaggttcaaaccagacagtgtgaccaggaatcccccctcttaaccatggtctttcctcaaacagcctgtacagcctttgacccagcagtcctcagtaatttgggggcagtgcacaagaccatcctcacttctaactccagcttcacactcaggggtcccctgatcaccttcagtttcgacagttcacaagtaggactcacagaactcactgaaagctcttattctcatgttatgtctcattacagcaaaaggatacagattaaagtcagccaaggggagaagagcatggggcagggtccagtgaattccaaatgtgtagtttccagttgtcccctcccagtacaatcacagacagcagtaattcctccttacatgacgtgtgacaacatgcatagagtgtcaccaaccagggacactcacctaagccttgatgcccagggtttttattgtggctttgccatgtagatatggatggctgttcacatggctgatcttagcttcagctgctctagagatagagctgacaacagtgacccaaagtccctaccattagtcatattattagactatttggtggtcatattattagacgaatataactatttagtcatattattatgaatattagtcatattattgggcaaggcactaaggtaaataaagacattcctatcaggtgagatattccaggggcttagagttccctcccagtagctgagagcaaagtccagacctctatttaagtagggttgagttctttcctgtgcaagttcacctctgggattaatcacggatctacaaatgggactaggcaaaagctgttcatgctgctgtgtacaaaaaaaagtgggccaggcatggtggctcacgcctgtaatcccagcactttgggaggccaaggtgggtggatcacgaggtcagagattgagaccattctgaacaacatggggaaaccccatctctactaaaacacaaagaattagccaggcgtggtggtgtgtgcctgtagtcccagctacttgggagggtgagacaggggaatcgcttgaacctgggaggtggaggttgagtgagccgagattgtgccactgcactccagcctggcgacagaggaagactctatctcaaaaaaaaaaaaaaaaaaaaaaagaactctaatataaactgtgggctttgggtgctaatattgcgtcaacgtgagctcatcaaatgcaatgaatgtaccactgtggtggggctgttgataatgggggtggctgtgcatgcgggagggcaggtgatatatgaaaaacctctgtaccttcctctgaattttgctgtaaacctaaaactgctctaaaatatcgtgttttttaattgaaagaacccggcctggcccagtggctcatgcctgtaatcccaacacttgggatgccaagggggatggatcacttgaacccaggagttgaagaccagcctggccaacatggcaaaatcccgtctctactaaaaatacaaaaaatattagcccgatgtgatggcacatgcctgtaatcccagctactctggaggctgaggcatgagaatcacttgaactcaggaggcagaggttgcagtgagcctggatcacactactgacctccagcctggaggacagagtgagactctgtctggaaaaaaaaaaacaaaacttaaaggacataaatgattgcaaatagaggattggttgaataactcaacccatatccaatccagtggaatactacacagccatgaataatgaacagtgatggtgcaaagccatgcttctcccatgagagtccaggacctgaggcagaatgtggggagtgcttcaagggagctaaagccagaagatccactttgtatatatttcagaggcaccatttacacggtaatactggggcaggccaattaactaacatcagtggtaacgaatgcgttattttcctattaaaactaacatggaggtgtctggctgtaggctgcaaatattcatatgggttttcagggcacagaagacttcaaagatattttctaaaccagtagacatccagaggtgcatattcaccttactctgacaaaacttgggtttaacatttgaaaagccctaataaaaacaaaaatttaatgatataattctgctctaataaaagagattcatatgtgcatgcgtatgccagctataacatacccaaactgaaaagacacatagaaaacagctggttgtatctctgggtggttttaaaaaacggtattctttaaatgacaataaataattttatatttattttacatacttatatagttatacatataaaatatatgtataaatatgtaaatgttaataatattacataaatatgtaagtatgtaaatcaaaaatttttataataaattcaaattcactccttttataatttaaaaagtagggtgtgttatcaaaatgaaagacaaacacattcccaagtacggttagaaagaccttgtcaattggacatttctgagttgttctttccctctctctctctctctctctctgtttctgtgtcttccctctgtatctcactctgcctgcatttttttttatgtccctgtctgtctgtctctctgtcaggtttcaaggggcccatacctcattacttctgtgcacaactcccctgtcctggatccctgtttttagaaacagcctgaccctccaacaacaaagtgtcaacctaaataacaaacagagagaagctctctaaaagaaaatgatatgtattcaggaatggggcattgcaatgggaatctgggtgctatagtaaactacgtgcatattcagggaggtaaaagaacacaaagggttttcaatggaaaaatgaggaggaccccataaatggtttgagataattaccctaggctacaaggatccctaatgagggtgacgtcagtccaagtttggaccggaggttgctgtccaaatacttgtcacagaagtatttttttggtggaaggaagcaatggcttttgtgcaagactatggtttctgcagcgtcttctgtgaaaatttttgttgtcagagagccctcgcttcacagccttccccactgtatttctcagggatttttttggcttgtgagcactttcacaaagggatctggttatacacacactggttcaggtctagaagagcattccctgcagccattcacaatggtcatgggaggaatatttagtgacatagagaaatagtccactgttgaggaggaaagcagccagttgtaaaacagccccaggcagtctaaaagttgggccctacaccgggcacggtggctcacacctgtaatctcagcactttgggaggccgaggtgggcggataacgaggtcaagagatcaagaccatcctggccagcatgatgtaaccccgtctctactaaaaacacaaaaattagctgggtgtggtggcacgagcctgtagtcccagctactcgggaggctgaggcaggtgaatcacttggacccggaagacgaggttgcggtgagccaagatcatgccattgcactccagcctggtgacagagcgagactccgtgaaaaaaaaaaaaaaaaaaaaaaagctgggccctgcataggaaaaccaaaccaaatggaaacaggacatacagttgaggagtttgatgtcctatctttgaggcacttggctgtattttctggttttctttgttttcccaacagtgagcctgtgtttttccgttttttcatgaccagagaaaaaaatgtaaattattataaaaataagtaaataaataatgaactaaaggcaacataaagccataaagataaggttgggctctcaagagccgtcttccccaggccccacccctgctggtcagagtgcaccctggggaggaaaggccgccctgaaggctgggagacgagaccggcagcctctgtgccaggagacacaggtcttggagggagcagaggaggtggctgtgtctctggagggacccctcctcctggaggaccccaggcagctcatggacctttccagacccagatggagcctgtggaggagggtcttcctcatgggtaagagatgctggatgctggatgagcttcccaggactgagggaagggcagctaggagcaaagcggcggggagggggctgggaccatccccatccacgggcacatcaagaaactcccagagcaggggtcggggagaggagaagggggaggaccctcagcacaactttcatgagctcacacacgtgggcacactttgcccctagacacacccctgcacagacccacacatgtggtgttacacacacacgcacacgcacatgcacacacacacacgcgcgcacacacagagagagagagagagaaactgtgtttctatctacgcccaggaatcaggagcttggaccttcaccctcacctccctgcactcacctcccactgggtgccccaatctgccccatcccctcccccacctctcaggccagattccttcccagcccctcacctttgcccaggaccttctgtgccccctacaagcacaactgtcctgctttaccacgtgtactgtccttgaacaggtccagtgtgtccatacgtgaggcctagagccggggtctcaggcatctctgcctcctccacatagcccaggcttggggttcacagggcagtggacaactgcccatgtcatatgtggtaacaggctgccgcctccattcacacccactccagtgaatttagatgcaaaatcaaagacatgtagaaattctcgggggagtatttctcacccagacaatcattactgaactccccctgtgtccagcctgtgctcaggggcgctggggactcagtggtgactgagacagggcagtcctgccctcctggagcccacagtccagggcgagatatagatatgtgcccagactctgaggacccccagaggtcatggctgggatggggggagcccaggaggagctgggggagcccagaggggacacctgacccaggctggggtggaggagacatccaagctgagacctgagtgatgaatagaagtgagtcagcaaggagggtgcagatggagaggagggagaaggagtccctgccgggaatggggaacagcgtgtgcgaagcctggagttaggagaaggtgtggtgcaccaagagagctatgtagaggcctggggcatacagcgtggcagtcatgtcttctgataaataactacaggaataaatgagtaaaaggtgcatagtggggacaggatggggtaggtgtgcaccacaaggaggctcgatgagtcacaaacaccagctctggctgagagtgtttcatatacccacctaagagtttggactgtatcctaagagcactggggagccatggaaggtgtttgagcagaggagaacagggtcgcaacttgggcttattaacatttacgtaactgtgatgtgaggatggattggaggctgtgtggctagcgaggagggcctgggagaagataagggtaaaatggaccacggcaggggctgaggggaggcacaggaggggacaagctggggactctaccaggagccagaaactcttgcctggttcaccagcgtctctgggaatcgttcccggatggtgtcttttttccttgtcttctcagccagtctgaatctctttgtgaatttctctctgtcttttttccttgtcttcttcagccagtctgctggcctgtgggatctgccaggcctctggccaaatcttcatcacccaaaccctggggatcaagggatatcggactgtcgtggccctggataaggtccctgaggatgttcaggaatacagctggtactggggtgcaaacgacagcgcaggaaacatgattatcagccacaaaccgcccagtgcccagcagcctgggcccatgtacactggcagggagagagtgaacagagaaggcagcctgttgatcaggccgactgcattaaatgacacgggaaactacactgttcgggtggttgcaggcaatgagacccaaagagcaaccggctggctggaggttctaggtgggttagcaggtgctgtgtttcccaacccccaaggagagctagatgtgacacatttgagagaaggacattatacagagcatgacaccgggagtggaaatcacggagccgccctggaatcttgtgtaccatggacagctcctgggggatctgagggctagtgggaggagagggcggagttggaagacaagcagtcctgtatttgacagtggctgcaaatacatactgcaggaccctggcccatttgtgttccttctgtgttcttcagtttcctcatctgtagagtggggaggaacccaccattgtggtttgtcgtagcgttggagggagtattcgtaaagtgaatgggactcaaataatggagtagtattgtgtagccaaatgccacctctcactcagaacctctcgtgtctcctggatgagggtcctggtttggaggatcagaaacaatgattaggccacatgtttatgccaagagctcaccattatggcagcagacagcacggcagtggctcaggcaaggcccacacctcagcagcctcattgccctgtgcctattcctctgcccttctcagctcccttgccaggatgccagatcttatcttacagctcttggcttctctccaacatgcccagaagtcccctggagaggagcagagcttggggaagcagaccccacttgtaatttttttctctttcctgcttcacccagagttgggaagcaatctgggcatctccgtcaatgccagctccctggtggagaacatggattctgtggctgctgactgcctcacaaatgtcaccaacatcacgtggtatgtgaatgatgtgcctacctctagtagtgaccggatgacaatttccccagacggcaagaccctcgtcatcctcagggtcagccgctatgacagaacaattcagtgcatgatagagagtttcccagagatctttcagagaagtgaacgcatctctctgactgtggcctgtgagtggtctgggctcctgggactgaagccagggctggtctcagggctttctagggataggaatatgttaggacaggctgagctggagagagggggcatcctgggccagcctgcagccagctcactctggattggaatcagctcaggctcttgagccctgtgaacttgggagctgcccctgctactcagaaacgtggtacactcgagtttgaaatgaagacgccagtccccacttctcagattagaaatggtcagtgtgcctttgttgaggtctgcttttgtgtaaagaggggactactgaataccattgtttcttaaattgatgttcaattattaagttttcaagccccttgagccttgaaattctgctcattaatttctttcttcttttctactaaatttagtatagtccctgtcactctctttcactgaaactgaacaggctatgctcccttaaacagagagctttatttaaagactcaattatgcattccatacattcttttttttttatagccttttagctgcctaccggggcaagttcaccacccaggaagacctccacaaattctcagacagctcttggaaatcgaatacgctgaacttataaatacattaacacttagatttttccccagtattccaggactgctcacagagtttaataaactcttccacatcttccaactgaaaaccataatcacacatctaaaatcactttcacgtctcctggaactactccagcggtctgtcagatttcctaaagcgcaggctacggcacccatcctgtggaaggtggggttgaggggtgaacaatttctgacctccatacagctgtttacaggtcagaggcttggaaccaagacccaggatccagaggctgcagctgctcagggcagttgctcccaggccctgagactggctcaatccttctgtgtcagttggagtcataaagtcctaatcctctcctccgagcctcattgttttccatctataaaatggatcaatggtggaaccagtcacatgggttgttctgggaattcaacaaatgtggggacaggcacagagcttagaacagtgcctggcacacagtaggccccatgtgttggcttttactccactaattttattacaatgtaaatggcaccatgggcctggcctctagtagttccttaatcatagaagatgctcttatggttattgttgttgacacagctgccttgcctggggcaggtctaggggttagcccgaggtgcacaatggggaacctcctggctgggggaggacttcatgagacgggacgccgaggggtcagaaacatagcctgggcctcctaccctgtctctacagatgggcccgactatgtgctgctgaggagcaatcctgatgatttcaacggcattgtgacagctgagatcggctcccaagtggaaatggagtgtatctgctattccttcctggatctcaagtaccactggatccacaatggctccctcctgaacttctcagatgcaaagatgaacctctcgagtcttgcctgggagcagatgggccgttaccgatgcactgtggagaaccccgtgacacagctgatcatgtacatggacgtcaggatccaggccccccatgagtgcagcagctcccctccaggctcatgctttgcacatctccctgcctccatgccctgctaggcagtgcccaccctcaggagtgccacctccactgtgccatgacatgctctcaacctctgggtgaaatctcccagttctctgaggtctgggtccaaagctgcctcctctgtgaatcctctggagtcctcagatcagagtcagggtgactcccagggggataagagtagcagacattggctgagcacttactatgtgcccgcctttgttctaacctgtgtgactctcaccatttctctggagtaagtgaatgcgattggcatcacctccatttgacaggtgagaaactgagccccatggagtttgagtgcttattcaaggctctattgctttgtaacccatggaagaggtggcattcaagcccaggcaggcatagcctacaccctcaactgctcccttcagctgcttcaagatgaggaattagaaagacgcagggacgggatgggtggacggggagtagagatttggcatggccatggcgtcagaaacttggcttgggagtgaatttgtaaatggggaaagcatcttcttagcaaccatgcgtccaatcttctgcatcaaggagagagactgatgtgctcagggagactgcagaggagtgcagcaggtaaatgcaggggctctacagcccaaggttcttggtccaaatccccattctgctgctgcctatctccatgaacctgggacaagcagctccatcgttccgagactcagtttcctcaactgtaatgaaaggataagaatccctgcagggaaagggtgctgtgagaataaaatgaaactgtgcaagaaagtacagaagacattacaggatgtggtctccagactttacttcagccacactacctcctaagcacctactatgcaccagacacgatgtgtgcatgcagccctccaagtcatcgattcacatttttctcttcccctggactacaagattcaggagggcagaagctggggaagctttttttttttttttaacagagtctcgctctgttgcccaggctggatgcagtggtgcaatctctgctcactgcaacctgcacctcccggactcaagtgattctcctgcctcagcctcttgagtagctgggattacaggcacacgccactgtgcccagctaatttttgtatttttacaaaatagagtagagatggggtttcaccatgttgcccaggctggtcttgaactcttgacctcaggtgatccaccttgggcgagctttctgttttccatttgtcctcagtgcttggcacagtgtgtagcacatagttggtgctcagtgaacatttatgcaatgagttaatgaccctgtgtcacacaccccccttccagtcactgtctctccccttatgagggtttattcttctctattcacttatggttgcttgcagtgtgagacatctctttgcttaattgtccactgtccacttcccagctagaatgtcaggcccatgggtacagggagtttgttttgttggctgctgaatccctcgtacctggaacagtgctttgctgataatagatgttgacaaatctttgaagaatggatatgtgggtgggtgaagagatgagtgaatgcatgaatgggtcaatcgtggtcctgacccccaggtgtcctcttccttcagggatcttacctgttgtccacagagatttctccatctcaggatccatggtgatgttcctcatcatgctgacagtgctgggtggcgtttacatctgtggagtcctgatccatgctctgatcaaccactactcaatcaggtgccctcattgctctgggacaagggtgggatgttggctgggggctgggactcaggagccagccctccctccagaggggaagcagagccagaaggggagggataagccaggaactaggttgtcagggatcatctggggcagacagatcagcccccaggacctgaagctgatgggagcaagagagggtttagagtcggccatggttctaaatagctgtggggtttcttctagcaacttcccttctctttgtgtttataagggatattaaggtttacctagagggacaggtaaaaaaatgagaggtctgcatgtcaattcctggtacatagtcatcctttgctaccaagtgaagttggggaaacaggtatcagcggtgaactatgcagggagaagagattgggcagtgggatggttaaggtctgggttcaaaccccagctctgctacctgtaggctaggttaccttgggtaggtcacttctcctcatagctcatcctcagcccagctgaagaatgaacggagcaacaactgcctgaagggtgatgtggggattagagacacgtcttggaggaaaaggggacttgcagcattctcagcatagagtagaccagagtttctcaacctcagcactatcagcattgggaccataattctctgatggggaagaggaggtagtaaggctgtcctgtgcattgtgggacatttagccgcataactggcctttttccattagatgctagtggtaacaaccaccaccaccccagttcagaaaaccaaaaatgtctctagacactatgaagatcacatgggaggcaactttgccctggttgagagtcagtggagtagatgttagaaagtgcagtgatgcttgggaggatgatgacgttaatgatggagataatggtaccaatggtgatggtggtgattatagtgggaatggcaatgatgatgtagattaatagtggaaatggcattattgtgatggtgatgatggtgatgatagtaatagtggtggtggtgatagtggtgatgatgatgatgacaaagatgatggtagtgttgctagtgatggtgacattggtagtgatgatgacaatggtgatgatgatggccataatggtgacaatagtattatggtgatgatgttggtgatggtggtgctaatgatgacggtagcaaatgcagtgctgatggtgatgattatgatgaagcacaatgcctatatttttctgtgagctctggggtgacaggcaggcctctgagccttaaaaacaatcctagaccaagggtgcagctgggtcagcaggttgcatcattgtgcccggaggaagctgtttcttaggggattttccaaggtcagggaccgcatctccttcctactaagactgtagtaggagcagccgatggaactacttgagccccctggtctaggaaggagagccctcatctctaggggccagtctccttcacctgagatcaacatgcctagtgacagctcagtcctcaaggactctcacatatgcctaggtgtcctgcagaacaaaacttttgtttattgagctaattttcttttttctttttctttctttctttcttttctttctttttttttttttatatggagtctctctctgttgcccaggctggagtgcagtggcgcgatctcagctcactgcaagctccgcctcccaggttcatgccattctcctgcctcagcctcccaagtagccaggactacaggcgcccgccaccacacctggctaatttttttgtttttttttttagtagagacggggtttcaccgtgttagccaggatggtcttgatctcctgacctcgtgatccgcccgcctcagcatcccaaagtgctggggttacaggcataagccaccgcgcctggccttattgagctaattttcatctaaaattttaaactaaatgaaaatgtaattgaaatataaactgtgagatcaaaattatattgaaagttcatctaattgaaagattaaacattaagtaagatttagtacctgtttcatttaatattaaattgaatttaaactgtgaagaaatggccaggcatggtagctcatgcctgtaatcccaacattttgggaggctgaggcaagcagattacttgagcccaggagttcaagaccagcctgggcaacgtggtgaaacctcatctctacaaaaaatacaaaagttagcctggagtggtggagtgcttctggagttccagctactcaggaggctgaggtgggaggatctcttgagcccgagaggcagaggctcagtgagccgagatcgtgccactgcactccagcctgggcaacagacaccctgtataaaaaataaataaataggccaggcacagtggctgaagcctgtaatcccagcatgttggaaggccaaggcgggcggatcatcaggtcgggagttcgagaccagcctggccaacatagtgaaatcccgtctctactaaaaatacaaaaaattagccaagtgtgatggcagtcacctgtaatcccagttacttgggaggctgaggcaggagaatcacttgaacctgggagattcaagtgcagttcaagtgcaggttgcagtgagtcgagatcacaccatggcactccagcctgggcgacagtgcgagactccatctcaaaaataaataagtaaataatctgtgaagaaaaggcctgtaacatgaattaaccaatatggtagccactagtcatacgtgactaagtttaaaatgaattaaaattaaataagtaaaaaatccagctcctcagtcacaccagctcatggctatgagattggacggtgccaatatagaccatttcgtcattgccaaaagttctaccggacagcactgctgtaaaccaattatgtagaatgttcttaaagagtaaaaacaaaaccaaacaaaaccagaaaaagtagaaagagacaaccactagtccctcctctgtccctcaccccaaccccaggaactatgctgcatgggaagagaagagagctcgaggtggaaacagaattctcatattcagggaagagcagagaaaaggggattgcaaaagcagatggagagagtggccatgacatagtggggaggggctcaggtcaagggcagaaacagaatgatatgatggtattaataacaatctctgagattttatgatgtgcttactgtgtaccaacccttgttccaaggtatttactagtaagagcttactttatccccataggagatatccctgtgaggttgggaccagtattagttccattttacacatagcaagtaaagcacagacaggctgactccctgctatctcactgtatggtcaatgttgtaggctcctttgctaagggaccatgtaataatcataaataggttcaatatctaaatacaagacctcgcctgggaggtcagcgaggtcttggaaatgcagggttgttggctagtcttcaagagaggtctcaagacaaaaggtctcagagaattcagctgagaaggggtgggcccctgccttagggtgggctcctccctgggggcaggcccctcctggacctggaaccacattcttcacaagggctgcagaaggtgccagagtttggagtggggcagggaactcatgtggacagggctccagaatccctcctcattcccctaagagcagggccatttctgttttacggaatggattccatccaggggtgcatttttgcttttgtgggccctcctctagaaaaatattaaaaattatattttacgactatcttgatataaacatgtataaaatatagggtgggttgtattcagtttttttccttctgattttagaagaaattgaaacatttttgtgatccctaaaagtataatgggccttagtgcttctgtccataatgatcctgcttccactcgaatttcttcagacgaaaagtttccaggggtttctatccttgtgttcaaagtcattgatggagactgaatgagggacaaatgaatgagtcactgaggttgacttaatgtcaacctcatcatccaaagtgaaattttggatgattaggttgacattaagtcaacctcagtgactcattcatttgtctctcattcagtttctcggtccccccacatttcaccaagctcctggctttattcttgggcctctgatgaacaaaagatgaacaaactgctttccctgcccccagtaatatcacagctaccacgatccagccccctctttcagctccccttctccctccccaaaagatcaccctggagttactcatattttaatcatgattggatctggataccacccaaaaggcacaggagtggcatttcctagaataaatggtggggcaagagggagctgaggagacacacagcatacgtgtatgcgttttcactatgttatctaaagattttagaagatacatcttcaattatcttaatatttagatattgagcctatttatgattattatatggtcccttcaccaaggagcctacaatgtcgaccatacagtgagatagcaggcaatcggcctgactgtgctttacttgccatgtgtaaaatggaactaacactggtccaaacctcacagggatatctcctatggggataaagtaagctcttagtagtaattaccttggaagaagggttggtacacagtaagcacttcataaaatctcagatattattattaatgccatcatattattcaatgtgcaattctaaactgattgtgataaactcaagaaagttcaagggtatttcaaagagtgtatctgaatcacctcatcttccaccacctggaagaacccccctggcctggcagaaccacctccacgccactgtcccattcctttcaaaggcgccatgttctctatggtctggggcctcccctccgatatgagagcagggatctggaatcagagaagccagtttgggaatattggcctctgttatgttctggctgtgtgacctggggcaagtaacatcacctctctggaccctcatttcttcatctgcaaatgggttaaagtatctgtcttgcttggctgttgggagggttaaagataaccctgtcataagttatagtgcctggcatataattggtatgaagtaaattactgttattacctccatcattgttgtgatccctcataattaggccaacagtgcccactccttcctcagcttcacccggcctctttctccccacacagtggcatcttcctccagtgccctcggaaatctttaaaagtatggagatgttgaggactctcggtgcagaggtgcagccctcagaccatctcctccattgggtcccatgtgaggaagacttaggcttggacttggtgggaagtcgggccccttcacctctctctatccaggactctcccatgtttcttagggacctgagatgtggcttcttccctgatttctccccataggacaaatcgggctccatgagtgtccaccccagacctgaggacaagaccagaagggcaagcaggtgaggagagggtgatggagaagggctgggggtccccatagggccagcgaggctgaaaagggtccagggtctctttggagggtactggcaagagagggacccagcccagtcacacggaagcctggagatggaggctccagtaggaggtctgcagaccccacccgggacctgaagatgatgtcgtgggtagcgtggccattgggcgcttcatctgccaatcagagctggtcaatgggttgcaggtcggggcgggccatgcgcaaagctgggctctaattccaagcgcctcctccctcagctccggcgcttccagcttctcagatttcttcacccatggaatcaacagcgatgctgtaaacttatggccaaggggtgccaatcagtggttgttccactcagtgccgaatgagagaagagaccttagaatcaggcagggattaaatttcagtcctgccctgagtaccggagcgacctgaacgcagccccagtgaggctccctcacctggatgcaccgtggaaccatcgtcagcatgattagcacatccgtcagctcaaatatttaatttttttttttttttggtgacaacatttaaactcctctcttttagccattttgaaatattcaatacattattctgttatttggaacaacacggatgaacctagagaacattatgttgagtgaaataagccaggtacagagagacaaacactctacgatctcactatatttggaacctaaaatagtcgacctcagagaagtagagaagagaatggtgggtaccagaggccgggggcggggagtgtggaccgattggatggagaaagggagagtttggtcatcaggcacgcattttcagtttgacaagaggaataagttctgatgtcctgttgcacagcatggagggctgttaattctaaaggaatcagtctcgggcttctttgctgcaggggtcgtgagccctcaaacaggcctgagtctctgcagtttctcacttggggatgttgatctcggagtactcatagccgatggcctcctgttcctgtgggtactgaggcctcgctttgtggaagctgagggatgcatactggatctctccttcctctggggagggggtggccagggctggcggagcatggtgtggggggctgtcatctgccggggattcaatcaggggtccctgaatggaggaagagaagggagtcagtgcagagcagtggggccagcatgcaccagagagcatccaggaaggaggcccaggagttccttcctccattcatcccatgtgcactttgctgaaatctctttaatacgttcctctaatgtctaatactcaattatcaccttatgtggtgtttactaatctcattaacttccaacaacaattccatagtaagatattattattgtctccattttataaatttgaaaactgaggtagaaatggttaagtaccctgcgcaaactccctcttataccgggacccaatccagtcagttccttctgaccccaaagcctggagtcctgctgaggcctcctgtgtgtgagttcctgggctgggtgctggatggactgtggtggacacggtaggcatgggctctgaccccctgcatctcactctttaactgaaggaggtggcaataaatgactgccaaacaaatgaatatctatgtgtgaattatgataagatgggtaggaagagggcaagtgagagagaattacagggccttgattcagacgtggcacctgcccttgagaagctcacagtttggtggtgtggggaagacaagtcaataaaataaattatatccctcttataggaagaataatgacccctccaaaatgtccatgccctaatcccctggaacctgttgatctgttaccttacatggctaaaggggctttacagatggaattaggttaaggatatcgagatggggaaattatcctggattacttgggtgggcccagtggaatcacaggggtccttacaagtagtgaaaggaggagggcatagatagattggaagatgccaggctgcttgacttgcagacagagggagggtcctgagccaaggaatgcaggtgcctctagaagctggaaaaggtgagaaagcgcatcctcccctggatcttccagaaggaactggccctgcctgccaatgccttgattttagcccagtgacacccattttgggcttgtgaccttcagaactttaagttaatccatgtttgttgtttgaagccaggaaatgtgtggcaatttgtcacagcagccacaggaaactaatatagactcacacggtggagagtgacagaggctgcctgggaggcttctccttcatctctgaacttccctgctactcccctgcacagcagatgctccatggaactgtttgtgatttcactcccccattctgtcttgattactcaaattaacattcacacacacaccacatctcagcactgctgttatcaaggtcaccatgaccactgcttggctgagtccaaatgtccgtcttgcagtcttctccttcttggacttcacagcagcagaggacccagctgctcaccttccctacacagaagcccttcttgacttaactacaggacatcgtgctttctggctccatcttaccttcttggcagcccttttgctagatgctccacatctccctgaccctaaatatcagagcagccctgagctcttctttacttttgctttgcaatctcatccactgtgttgtcttcatgccatcaataaactgacgacttccaaatttacacccagccctctcccctctgctgactatagtccttgatccaatagtatacttcaaacccacacatcttgtcgaaaggcacacaaaatgcaacctattctatctgaactcctccttttttcccccagatctctttttttgcacaatcttttctgcctcaatgactgacccctccattctacccatggattggggcaaaaatctggaagtcttcttgctccctctctgtcattcacattgtacacccaatctattggcaattctcataagtctaacttcagaatttacccataagacagccatgtccaccaccactgccatcttggttccagccagcaccacttcctgcctgagatgttcaccagcctcctctctatcttctctgctctgtctttcctctaccacacacagtctcttctgcacacaacagccagagggatcccatgaaaataaaagttaatcatggtctcttgcacaaaactctccaaatgctcacagtgccctgtgcagccagacacgattcacacacaggctcaacttctccaaagtcatttcctgttcttggccttgcttccctctgtctaatcacacagacgtccttgtggatcctctcactggtccctcctgtgcctgagcctcaccctgttcttccctctgtctggagtgctcttcaatctcacagtcagtgtcagatctgagcctccttcattcctgtgctcaaacatcactaacagaaacacaagtcatcctacagaatggtagaaaatattttcaagccatacatctgaaaaaagttttaatatccagaatatattaaaaaaattcttagaactcaacagcagagaaacaacacagtttcaaaaataggcttaaactctgatagactttctctaaaggtgatatacaaatcaaaagaagcatatgaaaacatcactaattattagaaaatgcaaatcaaagccttaatgagatatcacctcacacgcgttaggatggccactgtcaaaaacaaacgaaaaccaaaaagtaacaagcgttggtgaggatgtggagaaatgggaacccttgtgtgacatttgtgggaatgtaaaatagtgtagccactgtggaaaacagtatggcagttccttaagatattaaaaaacagaataatcttagagtccagaaaccctacttgtggatatacacccaaaagaattaaaagcaggatattgaaaagatatttgcatgcccatgctcacggcagcattattcacaataaccaagaggtggaagcaacccaagtgtacatcaacagataaatggataaagaaaatgcggtaaacatacacacaatgcaatattaattaccctttaaaaagaaggaaatcttgtcacaccttacaatgtgggtgaaccttgaggatatttgttaagtaaatcgtccagtcacaagatgagcaatactgtatgatttcacttatatgaggtatctagaatagtcaaattcataggaaaataaagtaaaattggtgatttccagtggctgcaggaggatgaagaggatgggagggaaagggcggagttattgttcaacgaatgtggagtttcagttttgcaagataaaagggttctagagatctagcacaaccataaacttaataaagttgaggtggtaaattttatgttatgtgttattttccaccgtagatggctggatggatggatgggtggatggatggatggacgggtgggtgggtggatggatggatggatggatggatggatggacggacgggtgggtgggtggatggatggatggatggatggatggatggacgggtgggtgggtggatggatggatggatggatggatggatggatggacggacggacgggtgggtggatggatggatggatggatggatggatggatggatggacagacgggtgggtggatggatggatggatggatggatggatggatgggtgggtgggtgggtggatggatggatggatggatggatggatggactgacgggtgggtgggtggttggatggatggacggacggacagacggacagatggatggatggatgaatggttggatgaataaacaaaaataaacccacaagccttctccttggaacttcctatttcttctacattgcattttccctaaagcatatatctatctttatattttattcatttgttgttttattagttttgattagttgattggtttggccatatccctctgtatagaattaaacttcgatgagcccaagacttttaaatgttttccacagatgggtcgctggcatcttctcttaggagatgctctataacttttcctgaatgaattaatgaatgaagggatggatgttactctgctactcgaaaccttccacaggcttccagtcacattcaatacaatcaataaatgatgagtgtaatatttatatcagggcatgaaggatgaataggaatcagggagtggggagaaaaaagcatctgaggaggaggaacagccaatgtgaagacgtagagacacaaataaccttgttggtgatgacactggagtccagcgttgatggagcatggagcagaggcaggagtggctggaggcggggctgggattggagcaaagccagggaagcccttacccagagcacaaaattaaaagggtgccccaaatctcagcaatgaagatgaatacaattttaacacaatatttaaaaaatcaaaattaatataaaaagtccatggaaagcctgggcgcggtggctcacgcctataatcccagcactttgggaagctgaggcaggcgatcacctgaggttgggagtttgagaccagcctgaccaacatggagaaactccgtctctactaaaaatacaaaattagccgggcatggtggctcgtgtatgtaatcccagctactcgagagactgaggcagaattacttgaacccgggaggtggaggttgtggtgagctgagatcgcaccatcgcacttcagcctgggcaacaagatcaaaactctgtctcaaaataaataaataaataaaaataaaaacaaaaaattcctggagaacaaagatttaaataaacccagattagtgacagtgctctgctgagccaaatggaacttgaagcaaaagctattcaacgtgcagaggaagcagacagtgatggctgtggaacgtccctccaggccgggaaggggaggcaagaggcagggaggtgaggaggtcccagacagagatccagaggcttcagcagtgagaggggtcaggatgggatggggagggcaatgaaagctgttcttaggaggaaaaagtggacaggacgtgatttttcggctgtaggggaagaaaggaaggacagtgaggaagtaatccccttccatgcctggcctgggagaaagcaggggagaagggctgtgattcaatgctcactcacctgagaggctgagcccctgacagcgtttgcgtcctccatgcctgtatcccccacgcccactgctggccttgccgatttcttcctgcaggacctcactctgagtgaagagaccagagagcctttcagtgtggtcagatcggggtgcagtgggcagaccaacccctgccctgtatttcctattggggagctggaggggtaactgaggcgggaggggagtggtcccattccagagaccccaatgtcgaaaacagaggctcttttttcctgggcagtagggtctgaggtttgccacagacatggagctccacaaacaggggcgctcatgaaattcttaccatgcacccatgacctcattctggcccttgcttcaagctcttgacccatccaggtccttccaggtctggcttcagggattttgttcccagcctgccctcccccaaggctcttcctccccagggtcaatgctcacacaacgaagatgatgcagaagtacaggaagaccagggctgtggctccagctcccccgaatgcccctagcgtcactcctgatataggcctcattttgcctgaggatggattggagttgttttggggtttaccctccaagaactgggcctcttctcctcccactgcctgtagggccccagacttgggtaccccagtcccgcttcccggacagaaagaacaaggacggaagggaacttctcctgaggtcactgaggcatgagagtgctgggtgcagtctgcctttatttaaaattttgattagttttcaccatggaattattttacaataatttttaattttcgaaaagataatcacatggcaagattatttctcttgcttgctgagttgttttatttttggttcttaaattgtgtgcccaaagtgagtgcctcacttgcctcacactagtccaggcactggaaagcaaggcccttgtatccccaaacacacttgtccaggccccagctcctcccctccaagattaactcctcccctctccccaccccgcactcactgcttggcagcaagaggactgtgatgctgtgggttgcagggaaattccaggtctcccagctggaccctgagggtgggacatgtgtgttctcctcctccagaccctcccctacccacctgtgtactcgttttgcagggagaggctcagggaaatgtgctgggagcctagagggttctgagctcggcaggtgaattccccttcatccttcacatgcactcgaggcagctccagcaccccaaggttcgaggactgtgaggggctcagggtcaggctcccccaggtccagctcagcctggcagggggattgctgtcgacagcacagacaaggtgcagggactggccctccaggactgaaagggccgagccattcctcaaggttgtggatgctgtagagaaagagacagaagggcagagagagacaaagtgatcgaggcagggaggaaggatacagaaagagagtggtgaatggaacagacactgatacatgctgaattgtagggacatatgcacgttcactgctcactgttggggatgtaaacttgtccatctttaattagaacaatttcactctatctttcaaaatcagaaagacatatgacactgctatattttgcttttaggactttattccatacacttagatattccttgtgggagtagatacaacaatattcattgcagtgtttgtgctgtaggataaaattagtgccatgatcttccattagaagatgccacaaaatcagagactattcagacagtggaatgacacacagccctagaggagggtgcaaacagtctcactactgacatcaaaccacctctgagatcttccaggtgcacaaaccaaggctcaggacagcctggacagaccctggtcgattctggggacagactctgctgtgcattataaatttttgcccatgtgactatagtatgtatccaaaagaatatacctcagaactattggtgaaaataaaaggatgaggcaatattcaggagctggaagataagagtcctcaaatccttgagctgctgtgtgaatgtccctctacccttgctgtggggccaaaataggtgtgtgtgtggaggagttcaaggggagtgaaggggtgatgagaaggtgctcaggtggccaaaaggctgaggctgagggaggggggggccggggctcacccacaaaagggtctcaggtcaccagggtgagtcctggctctcccctgagttgaaggctctgctcctccagccccagggagaggactccatcttacctgtgccatctccttggaagacagtcatggtcaagttctgaggaggatctggaacagaaagacacggagttcccatcactttgaggactggggacactgaccctgtctccccaggagccccataaatggggaaggtggagccagcatcctcctgacccccaactcccagccaagattccaggacccagatccttgagtctgggtcccacatccaactggcctcaaggaatcccgatcaaagacccagacgtcctggcccagaactcacaggatatgttgagtcggacagccctggtcatggtcacgccggccccaggcaaggtcacctgacaggtgaggctggtgccatggtcctggggctgtgggatgaggctgagcatcgaggagcgagtgatagtggggtccagggaggacacggaggcccccatccaggtgatcgtggggggcgtcccctgttcacaggcccagggcacagagcaggtcaggttcctggggtggccagactccagggtccccgggatggagaaggtgggcatgtgagtcagggctggtgatgaaagggagacaggcaaaatgagggtgttggggtctgaagtgtggtgctgaggaggctcaggctctggtcttactcctcccctgagccagatatgcttcacctccaactccctcccaggatgggggtcccacctcagccctaccctgcggccctcgggccttcccctctggctggtcctagagccagagatttacctgtcacatgcacagagagcttgtcatatatgtagttccatttcctgcttcctctctccacctggaagtagtacttccctgaatcccccttcctggcatctctgatgctcagggagcagttgttggtctgtgggtccccaaggaggaggaatcgaccgtgggtatcctcttgcacttttccacttggggtgtttgtggccactggaatatcccatggtatatcggccccttccttgaaccaggatccataaacagggctagaggcagtccagttgtaatgggggtaaaggacactgcagggcacagagacacacagaccctcctgcacagtcaccgactctggcacctccagcctgtatcttgacagtaggtcctgggacgctgtggagaaacgagggtcagcccagcccccactgtccctctcttcatttgcccatagcaggggcagcagcatctctgaggcagaggcttcctgggctccctgtgtgagcagagaagggggagggagaggaggggcagggctgtgggacccacagggggctggagaggagctggagacctcagccctgcatggaagagaaactgcaaacccacatgctataggaactcattccctctgcacagagtgaaggaaaccctaaagctcagagaccctagagacccacccagggaggagaagagaccgtgtcccgcctcctacctccgggcttccctgaagcaccagggcctgcaccagacacgtaggtcctgccctcccggcctctggaccatcgtggaggtccctcctgtcttttgagcatctaaatgtggatctccgaggacctcggggcatgagagatggaggggccgtgtgctgagtctccctgtccaggctcaggtgcctctgctgcccttggtttgcgccaggaagtgcttcctccctggcctggcctgagagagtcacggggttgtgtagacctaaggctctcaactggggaggacttaaccccccaggacgtttgacaatgtgtggagataattgtctcgctgcatgggtggggtgggtgcttctggcatctggtggggagaggcctgggatggtgctaaaccccggccatgcctaggacaggccccaaaacaaggagtcataaggccccacatgccacagtgccagcgtcagaggcaggatgaggatgtcaggcctgtgggtcagggctggtgaggggaggggcttgcaggatcaggaggggcatccaaggtgcggtcctggggaagctcaggctctggtccagctcctcccctgagtccatcacccccggccccctcccaggacatgtgtcccgtctcagccgtgccctaaagccctcatcacatttgcctttggcctctcttggagcccgtgccttacctgtcacattcacagagagctggtcatatttataattccatttcatatttcctctctctacacaaaagacgtatgtccctgcatcactctctctggtgtctctgatgctcagggtacaatccttgttctgtgggtccccaaggaggtggaatcggtcccgagtctcctcctgcactgctcgagctgggttgtttgtggccactggaatgttccggcttacatggtcccctgcccggaaccagtagccatgaactggatcggaggcagtccagccattttgggggtaggagaaggagcaaagcacagagacacacaggccctcctgcaccgtcacggacttctgcattgtcagcaggtaatccttctgttccttagcccccactctcccacagagcaggggtggcagcagtagcagcagcagtagcatgtgtcgggttggaggtgccagggttgctgaggtaagtctgttcctcagggttcttctctcaggaactgagaactcaagatttcgaggaagccgcacaggaagttgggggtgggttctgaacggtgacctcacaggaggaacttcacacacagacactgtcagggccgggtcacccctggaagatccaccgtccactaccccgtccactcctggggaccctgaggccagagaggatgaaagactcacccagattccaaccccatgcagggcccaccccgcccactgcctccctctcagtgcccttccccttgggtgatattttccataaggtgaaaatgagtcccatgtggccagacctatgaagtacaggctgtggatgtctctctgtaggtcagaggtgacactaggatataagagatgggggtgcaggtgggatgagcaggcaacctctccttcctccctcagcggccgtgaggtggagttcaacacagcagagctagacactgtccccaaagagtcactgtgtagtggggagacactgaggctcctgatatctgagctctccatggcaggagcttcagtgggggtaccaggcagggtgtggtcgctctctcctatgttggggaatcagtctcgggaggactgagcagagagacacggggtcgtggaggtgaggattccgtgtgttgatacacaccaaagacacagagaagagcccagttcacaggaggcctgagaagctaaggctgtgactgttgtacagtgaggtctggaagggaggaatgttggatgggaagggacagatttctaaaggggcaggcgtttctctctcggccatggctctctgggttcaggatgggatccttcaccactgctctctcacaagtcctccttactccagagcatgaggggtctgctggccctttgttcctgcaggctctgctcccagggtttcaggtgaacaggagacgtggagcgaggacaccagccctggcgtgtccacgctcaatgatggacaggatttcatgggagaagaaatgcacctgaattcagcagaagagtttttgaaactgtatgctatgtactgggaggaaggtggggaaaatcctgcaagattcgccctccttagacccatgtcagcttttcttgaaacaatgatttttggggaaatgtaatacaagtaaataaaagtgccacctaaaaaaatgactcagtgattttcaccaaattatcactgttcaagaaatagaacatcacaagataattgccaaatttctcccatgagatgaagaaagaaattgcattcatttattcagccctgtgtttccccttcctataggccacatgcagttcctcctgaagatgccccagcctcactttaatgataatggtctccttgcttttctatgtagttttatcatctgagtgcactgccttcaatactatggctttgcataggtttttctaaagactatttttacataaaaaccacaatctgttttattttactcagctccatggatcttcccatccccatgttgtccccaattgcccataacctggagtagagtcagttggctgtgataattgaaaaggaaatgtgcaggattggggcatgcatagctgctcctctccctgacaccactaattcctgcatttgcagcttgtatctcatcctgcagaccaatctgctcctgggcccccatccttgccgtgtcactttcttcccgtaaggacagttgcagcatctcaatgggaagaagggctcgaccacggcccatctctttcccacagtccccagttggcaaagaaaagcagaaaaatgggaaggagagacatgaggaagccacagagaatctgcaaaggaagaacgtttgaaccacatatgactcagaggagctgatgggccctctagacccacttccataatttggagaggaagatattaaggaccagagtgacaagtgctacagctacatgtctctcctcaaaattcatttgttgacctttgaacccccatgtgatagtattagaaggcatggtgtttagataggtggtttggattagcctaataggattagagcctgatatggtttggatctgtgtccccaccaaatctcatgccgaattataggcctcaatattgaaggtgggttgtagtgggaggtggttggatcacgggggtggatttctcatgaatggcttagcaccatcttcttggagctgttcttgtgagagtgggtgagttctaacaagatctgcttgttgtctgtgtgcagcatctccccatttgctctatcctgctactctggccatgtgacatgctggcttcccctttgttttttgccatgattgtaagtttcctgaggaactccccagaagccaagcagatgtcaacatcctgcttcctgtacagcctgcagaaccacgagccgattattcctcttgtctttataagttacccagtcacaggtatttctttatatcaatggaagaatgaactaatacagaaaattggtacagaggagtggggcattgctacaaagacacctgaaaatttgaaaacaactttggaactggttaacaggcaaaagttggaagagtgtggagagctcacaaaaagacagaaagatgaaggaaagtttgaaacttcctagagactggttgaatagttatgactgaaatattggtcgtgatatggacagtgaaggccaagctgaagaggtctcagacggaaatgaggaacttattggaaaccagagcgatggtccattttgttatgccttagcaaagaacttcactgcattgtgcccctgccctaggaatctgtggagctttgagcacaagagtgaagattttcagtatctcgtggaagaaatgtctaagaagcaaagcattgaagacatggcctggttgcttctaacagcatatgctcatgtgtgagcaaagaaagaaatcactgaaagctggaaattgtatttaaaagggaagcagagtgtaaaagtttggataatttgcagcctggccaagtggtagaaaagaaaagcccattttcaggggaggaattcaagcaggctgtagtcccagagaccccaacattgaaaacagaggctcttttttcctggacaatggggcccgaggtttgtcacagacatgtggccccacaaacaagggcactcatgaaattctcaccatgcacccatgctcattctctcccttgcttcatactcctgactcagccaggtccttccagctccggcttcagggattctgctcccaggccaccctcccccagggctctcccttcctctccagggtcaatgctcacacgatgaagatgacacaaaaggacaggaagaccaggctggggctccagccccccttgaccgcctgcagcatcactcctggagggttctgagctctgcaggtgaattccccttcgtccctcagatacacttgaggcagttccagcagcccaggattcaagggctgtgagaggctcagggttgggctcccccaggtccagctcagcctggcagggggattgctgtcaacagcacagaccacatacagggactggctttccaggactggaagggctgagccattccccaaggtggtggatgctgtagagaaagagacagagggtcagaaagacagtgatcaagacaaggaggaatgatacagaaagagactggtggatggaacagacactgatacaggctgaagtgcagggccatacacaccttctcagctcactgttgggaatgtaaacttgcccacttttagttgagaacaacttcattttattaaaattagaaagaacgtataacactgctatattttgcttttaggaactatgctatacactcagatattgcttgtggaagtagatttatgattattcattacagtgtttctgcagtacgataaaattagtgccatgattttccactgggagatgctacacaatcagagtccatccatgcagtggaatcacacacagccctagaggagggtgtgggcagtctcactattgatattggagcacctctgagatcctccaggtgagcaaaccaaggcccagggcagcctagatggacgctgggcgattctggggacagactctgctatgcattttgaattttcacccatgtgaccataacatgtatccaaaagaacgtagctcaaaactattggggaaaaggaaagatgaggtaggtggtgttttcaggagatggaagaaaacaggcctcaaagcctgtgttgtgaatctccccctgcctttgctgtggggctgaggggtgtgtgtgtggaagagtcttaggggagtgatagggaagtgtagagtcatcagcagcttgcaacctcaacatggaaaagctacaggcactcatctccaacctatgagagcagccacgtggcctacacctgtcaaagccacaggcagaactgcccacggccttgggagctcaccccttgcaccaatgtgcccaggatgtgggacacaaagtcaaagattattattaagctctaaggtttaatgtctgcctgcaggaatttggatttacatggagcctgttgccactttctttggggcaatttctcctttttggaatgggaatatttccccaatgcctgaaccaccaatgtatcttggaattaaataacttgtttcctatttcacagggtcataggtgggaagaacttgccttgagtctcagatgagactttgcactttcagttgatgctggaaagagttcagatgttggaggactgctgggaagaaattattgtattttgcaatgtgagaaagagatgagatttgaggagccaaggcagactgatacagtcttgatatttgtcccctccaaatctcatgttgacatgtaatcccttatgttggaggtggagcctggtaggaggtgtttgggtcatggtgccctcccatgacaatgaattctcactccattagttcacagaagagctggttgttgaaaagagcctggtgtctcttcttgctccttctctcaccatgtggcatgcctgctcccctttcaccttctgctatgattagaagttttcagaggcttcactaaaagctgagcagatgctgattccttacttgtacatcctgcagaaatgtgaaccaaataaacctctattcattctaaattactcagtctcaggtattcctttacggcaatgcaaaacggactaacacaatactttaagtcctctccagattattgataatacctaatacaatgtcaatgctatgcagctagttgttataatgtattttaattgtattatttttcatgattgtgttgttgttcttattggtttttgtttttttgaatatctttgatccccagatggctgaatccaaggatatggaatgggtggatatggaaggtgcactgtatccatttgaaatgaggccacttgtatgggtcctaattcaatataacttctgtccatctaggagagaagattaggacacagagacacacaaaccatgtgaggacacagagagaagtcagcagctacaagccaagtagagagttccagaaggaaccaactctgctgacatgttcagcacaagaaccgtgagaaaaaaaaattgttgtttcagcctctctgcctgtggcacgttgctatgagagcttgagtgactaacaaagtggataagagaacaaggacaaggcggagacaggaacagctaggggtcacctcctccagaaggcctctcctgactttcctccattacaaagagctgaccactcccttcccaggacctgtcctgaatatctctccagcatctgggtcacttaggagacccccagtgcttttctatttttaagagtcttcatttaccaacttggggtccctggagctcatatgccatgtaagattcacctccatctatcctctttaactcagcatctgtttggtactcccggtgcacggaggttgagggatgagctccttgtctctccgtgaccaaaacagagtcatttcaggaagtgccaagtgaggggacaatatcttgccgagtttactccactcaccccacataccccaagcccttcatgttgcctgaaactctcgccttcagtgttacctttgagtacaagtgttcagatctcaaaagctgttacaagcattgcccaattgaatgacagaggaggaagggagactgggaagtggactaaggcctagtgggggtgggagggtacttctgggagaccaaaggtcagtgagttcaccaggaagcatgaaggcgtggggctgacaccagcctaaggtggacagatttatcaaaacaaaaaaaaaaaccatggaacatatgtggttgaatttgaatttcagataaaaactttttttttttagcgtaagcatgcctcatgcaatatttggaacatacttatgctaaaaaatatattatttattctctatctgaaagtccatttcaagcaggcatcctgtattttatctgagacgaccagccccctccagcaactgttcctcccctgcatccatcaccaccactgctggtagcccagataaggggagttccctgtggactttcattgctgtttcctcactgacctctaaattgggggccagagggagagcccccaaacccctctgcacccatagccatgcccccaggacagacacagctctccctcttctcttccctggagggggctctggaaggaccagctcagcaaacccgaggccaggcagcccccaggagacccagaggacaagtggcaaggtgggctggggactggggaggaagggaaaggagtccttccacccttggtggtgtccatgtgccctgctccttctgctacccccaagacagctggactgactctgacccacttcacagctattggttaggggaagtggcccttccagcctcagatgctccagtggccacaaacaacccagatagaaaagtgcaggaggagacccagggacagttgcaactttccagggaccgacagatcaatgactgctccctgaggggtcatacttctttcacatggagggagggaatatgaaatggagatacaaaattaaccagttgtccatgcatgtgatgcgtaaggcatgggctccaggagaggccataagcaaaggtgctgtggcggcagggcagggctgggactggatctccatcctgggatggcatggcgttgatgggctcaggagaagaactggaccagagcctgagcttccccctgggtggcaccttggatccccgtcctaatcctgcttgtccccctctcctcaccagccctgacccacaggtccaacccacaggcccgacatcttcatcccaataaccctggagtcggctgccccagcaatctaacctgctctgtgccttgggcctgtgagcaggggatgcctccgacaatcacctggatggggcctccatgttcccactgggctccacctcggtgccctccacagtccaggaccacgacgccagcctcacctgtcaggtgactttaccgagggctggtgtgaccacgaacagtaacatccaactcaatgtgttctgtgagtgttgggccaggatgcccaggcccctgactgggtttccctgagggcagtgggatgcgggtcagggttggacacagggatctgggtcccggtatctgggctgggagtcaggggtctggaggatgctggctccaccttttccatttatatggctcctggggagagagggccagtgtccccagccctcagagtcacccaccaccatgtccagctaatttttatatttttagtagagatggggtttcgccatttggccaggctggtctcaaactcctgagctcaagggatcctcccacctcggcctcccaaattgttgggattacaggcatgagccactgcacccagcctcagcatgagatttgaaggggacaaacattcaaactatatcaagtatagaggaggatgtgcttatgttacatgcaaatactctttcattttctatcagagacttgagtatcatgggtttttgtatccaaggggggttcactcccccactaataccaagggacagacgtatctctttaaagatgtgtttccaaatacagtcacattcttaggtactggacgttggatttcaacagataaatttggttggggagaggaacacaattcagaccctaatatttaccttccccttttctctgatctctggttccccatgagccaccaacatgtgtattctccaaaaaaaaaaaaaaagttatctttttcctgggaacgctcatgttgggaaatatcacaccctcccctccatccacagagctcagaaaaaaggcctctcacaagaaggtgtaaacggaggagggtgtgggtgtggttccctcagacctcagagctgacccctgaggtcctgcaatcctaggcccagccccacttctgcctttgggcatttcatacccatatggaaccagctgacaggaaccaggaaagtggtaacgtctccgtcctcctgtggatttttctatgccattgttctcagttgcccatgggccagagaagggagagaggaccccctgccaccttgaggctgaaaggtgccaatctgggactccccagtggattcagaggcctcaccatctccactgagagtgtggccccccttgggttagatctcccttttaaccttagagctgatccccgtggtgagaatgaggacctatggacttcagcactaggggaggacagtgtggggtcaggcagcatctgtgtgcacagctgaattgaagcagagctgggtttgataggaagagaaagggagagagggggtcaggggccttcagtggctctgctgtgggttgatccttctcactcctgggaggtgctgccaagagggtcctggaaaagtttctgagcccatcagcccctgtgcctgtctccctgcaaacttgtgggttccctcttctcttcacaggaggatttctctgaggaaatgtcttccttcatttcctctccaccctatttcatcttgctctgtccctaccacatcattcaaacggttctggtcaggattactaacgacctccaaagtgctgaaccacctgtacaatttctattctcatctcacttggatgcctctctctcagtagcattaggctcagtcactcattcctgtttaaaacacttcatagattggcttctgggccacctagagctgccaccttgcaccagttgtgggcaacacacacatactcctaagtcacctgcctggatcaaactatatgtaacatactagaaacttcatgcctccttctaccttcctaaccatcttccttatctttctaagggttcctcctctgttcctgacacctaactgttgaaatccatcctattccaacatgtcctatttgaaatgcgaaatatgaaaaggttcctatttcatatactgttttaaaaacacaagctaccaatgtcaattctttgattttcagatcatcatattctcatatcctatgatgatagtgaaggaggctgaggggagggtgtgtgggtcctccctgtacatttctttgcaacttcctatgaatctgtagttgtttccaaatcaaaaataaaacaaaaaaacaaaaaacgaccatgaaggcacatgagaatgacaaccaagagactcgctgatgactggtaaagttggatgccaaaccctgaccatttcctgtctctgtggcatctactccgggaaatgaagtgggcatctccagcctcatatgttccaggcagcactcagtgtttctctcctcaaacttcctgcagggggcgttccctctggccctttgggatgtctgagcatcagtatcaagtggtatctgtttgcatctgcctgcatcccagtgtcatcctgatttccaattcccatatacaatctatccacacggcctgtcagttaaacttttttttttttattagatggagttttgctcttgtcgcccaggctggagtgtagtggtgtgatttcagctcattgcaacctctgcctcccgggttcaagcgattctcatgcctcagtctacctagtagctgggattacaggcatgtgctggcacgcctggctaattttgtatttttagtagagacagggtttcaccatgttggtcaggctggtctccaactcctgaccttgtgatccacccgcctcagcctcccaaagcgctgggattacaggcaggagccaccgtgcctggccttgtattttttatttcttagttaatttcactggctaggacctatactacaatgtcgaatagaaataatagggcagatattccttcctttctcccaatcttaggggaaaaagtgttcaatatttctttattacgtatgatgctaattgcaggtttttagatgctcttaatcaaatcgaagtttttctcttctagtcctaatttgttgagattgttttaaattataaatgtgttttaaattctgcccagcgttatttctggagtaatcaagaggcacatttgatgtttctcttttattctggtagcgtggtgaattacatttatttttggatgtgaaaccccacttggtcatcatgtattacgtcaattttatttgttggattggatttacttatatttaaatgaagacttttctatgttcatgaggtgcagtgatctgcagttttcttttcttgtaacgtcctcatgaagctttggtatcaggtttgaattttgcctcatgaaatgagtgttttctccttctctatttactgagggagtctgggaaagtttgatattatttctcctttaaatgtttcgtagaattccacatacagtgccatcatgattaattaattacctatgattgagtggctattaagcaaatgccttgaaggatcgaatggcgatgctattcactgctgtgtgagcattaatgaccacaaagactgtgtggtaaactctctgctcctaactctgctggaaaacctgcaaagggcaagtgccaagctcaggtcttaccttgtaggtcaagttatggttgtaaactacagaaatgccttatgacttcaaacaatttcatgtcatttgactatggggacaatcttgcaaaaaaaaaaaaatcagaccccaaatttaattgtatttattgaagaattacgacataatttgaatttaaagatttgtctgcgcttcttataggaaatttagggcagttattggaaaggactgaggggcttgggcttggaaaggggtcttgcatgaagatcaagtacccaagaacatgtggatgacccctatgcatggtctttggataaagtcgaaaatcttcaacccccttgccccaagactttttgaaactctcttgataccagaatatagcctgatttccttggtctggagagattagtctttccttactggaagactctaataattctgcttggagagattgcccaagcacaggaaggtgctgagtctcttcaaaactcatcccaatcactattcattccagaccaagaataaaatgcaagtctcttccatggggtaaatgcaatgcccgacccttgagaagatcttacattctaaaggaattattggattctctgatttatatcagcagacacctgagaaatatatgttaaagtggacactaggaatcttagaccaacaaagataaaatattacactggcttagccaaatatattgatacgggtgtactaacaaaagattacagatacaatgttttggctcaagaagctctcaggtggatgaaggaatttgctttatgtttgattgaaacaatattatcactatattccaatgaaaatggactcaacaatgacccaaatttaacgaggatgatgtcagaactttcttggcataatggagaaaaaataacccaaaggtttagagagttaaaaatgttggaaaataaaaaatgacaaaagttcaacctgtaccctcatctcctctgctcttacccctcaagtagtatactggtaaagacagcacaagtgtccatgaaaagctctgtgaagactaacctggttcagcctattttttttcaccttatatattctgaagccattctttgcctatttttgccttacatattctgaagctattttatcatgtgcaggtaaatttctaatgtatcttcctagtatattgaatatttaatccttaaaaaattggcccttttatctccattaacactttgtttggtaaaagatatattttctgatattgacatacttatgatggtcagtttaatgtgccaatgtttctaggttatagtccccagaacattcaatgaaacgttaatctaggtgttgctgtgaaggtgctttgtacacaggattaagatttatgatcagtttattggggatgacagaaagaaatactgcaacggatataatcacactgctttcaatcaggatgatggaattgtcaaaggcaatgtgtcattacttaatccctagagataagttgagcacattagctttaaagaggatcagagataaaatgggaggtcatcctacccctaccaaagaagctcaattcttgatagtcacctttggattttggaggaaatgtacaactatgattggatgctctaacccacttactacgtaaatcttaagacttccagtttggagttgttctcagttcaaggaaaggctctgcagcaggtccaggctgtagtataagaagctttacaacttgaggtttataactcaagattaaattatacttgaattatctggaataattaagaatgtcggtgtgccccagagtgaagacccctaggacttttgttgcaaagccatgctctgtttttgagaacatgatggatctcttgagaaagagcttctgacttattaccaggccttggtagagactgatacccttactatgggatatgaagcgaatatataatacaaactgcccatcatgaagtaggtgctctgtgacccatcaagctaaaaggttgggcatgtgaagcaataatccattatgaagtgaatttggatatgatataactgacttcaagatgggcttcaagaagtccagaaatcacaaccaagtgacatgagcaggtgacccagattcctacaactcctcctgggatattgccttattttttcatgaaatcacatgtgtgacctcatgggcagttctttatggccattgcttgaggaggaaaacatttcatcttggttttcaagtggttctgctcaatcaactggcacagcaaggagtggacttttgcatcatgacaaactcaaccacagtgaacctgagagcgggactgaaggaactccccctagtggcagaatttcataaatacatttggcttttcattttgagactgagaggtcagaaggacagatacaaactgaaccatgcctacagcgttaggtaacacattttttcccagaaatttgtccattttctataagtattcaaaacttttcatacagcttactactttctgcttattttgcattagattaagtaatgttttctcccttatattcctgcatactagttatttttgccttctatatttctggactaattgcaactgaggtttgcccattttattatttgtatcaaaaactagctgttcgtgatgttgttcctttctactgaatatgttttctatgctatgtgctcttatcatttgatatttccttctctccaattccttttggttttgttgttctttttctaagttcttgaaattaaagcttagtttattaaattttagcttttcccaccctagcatatacatttaaggttatatatagttcctctaataaatgctttagttttactctaaaagttttatagtattttcagtatccagttttaaataatttcttatttgtgttatgatgataatgatgacaattttttttaagatggagtctcactgttgcccaggctggagtgcagtgcctcccagatccaagcaattctcctgcttcagcctgctgagtagctgggattacaggcacatgccaccacacccagctaagttttgtattttttttttttcagtagagacagggtttcgccatgttgcccaggctagtcttgaaatcctgacctcaagtgatctgcccacctcggcctcccaaagtgttgggattacaggcatgagccgccacgcctggctgtatgttttgattatttaatctatgacttattttaagggattttctaagtttccactaattatgtacagttacatagacattggtatataattacattttattacttattttgagcttaataacattgaaatcaattaacatattctgtatggtttcacttctctgacatatgttgaaatatacttttggcccagtatatggtaaaaaaaaaatttttaatactccatgtgtgctcaaatagaatatgttttctgcagttgtttggagcagtttctacctatggccatagaccaagtttgttaatcatgttatttatgtatactatgttgcatatccttaacaattctcttgtttgtgtgtaccatcagttattgtaaaatatgtgttaaaaattgccctccataaatgtggattaggctattttgttttcactttgcctattcttgccttatgtattctgaagctattttatcatgtgcaggtacatttcaaatgtatcttcctagtagattgaatctttaatccctacgaagtggtcccttttacctccattaatacttctttttgtaatagacatattttctgatattgatatattcagttttatgtgtcagtgtgtctaggtaacagtctccaggatattcaatgaaacattaatctaggtgttgctgtgaagatgctttgtacacatgattaagatttataatcagtttaaggaagattatgcttcataatctgggtaagcctgattcaatctgtggaagaccttcagtgcagaactgaggctgctctgagaaagaagaaattctccctgtggattgcagcttgagctcatgacgaagtcctagcttggacttccagatgaccctccctatagatctcggacttgcctagccagctcccacaaaagcatacgccattttcttgcaatgagtctttctttcttttttttgaagttcctttttttaaacttttattttaagttcaggggtacaagtataggtttgttacataggtaaatttgtgtcacgagggtttgttgtacagattgtttcgtcacccaggtattaagcctagtacccattagttattttttcctgatattctccctcctcccaccctcctaccctccaaaatgccctagtgtgtgttgttcccctctatgtgtccatgtgttctcatcatttagctccctcttagaagtgtcaacatgtggtatgtggttttctgttcctgtgtcagtttgctaaggataatggcctccagctccattcatgtccctgcaaaggacatgatctcattcttttttatggctgcatagtagttcattgagtatatgtaccatattttctttacccactctatcattgatgggcatttaggttgattccatgtctttgctattgtgaatagttgaatctttcaatacatacatcctacagacttgttttttccagtggaaacttgactgactacatcagtttcttttggttacggttttcatggtatgtcttttttcatccttctacacacaacctcccctatatttatcttttatgtagatctcttataaacaacgtatagctacactttcccccagtcttactatgctggtattttaactgtagcatttaattcacttgtgcttaatgtgattcttagactgtatttgagtctaaatacagaatcttatacttgtattctacatgttctatccatcctttttttctttaatctcttatttcttgtcttctctggtttgactgaataatgtttctatcaccttttatacttcctctagttcacaggtggtaaacttggcttcgaatctttaagtaaatttcctcgagattacaataataaattatccaaatgtaacattcatcataacatttaattttctctggaaaaatataaagactttatgtaatataaattctatttacactcttctgaactttatgttattatagtttctgggctatataatattggtatttcaatattacatttgatgtttgacccctctacaaaccatcatttttacaacaagtatttgtttcattttgctcacatatttgctactttcctaggttttcattttttttggatctcaaaaatctaatctgggatcactttcctaatacctgaattatatgttttagaatttatttgagaaatcttttctttattaacactcacatattttggttttccttaaaatatctatatttcactttcagtcttaaaatgtgttttcattgagtaggctttctaaaacaacatttatttctcttaagccatcaaagacatctttctattgcatttagccttccaatattgctcctaaaaaagtcagctgtcagtctaattgtggttttttgcttgtttgtttgttttgttttgctttttctgagttggagtctcgctctgttgcccaggctggagtgcagtgatgcaatctcagctcacttcaacctccacctcccaggttcaagcaattctcctgcttcaacctgcagaagtacctgggattacaggcaagtgccaccacaccgagctaatttttgtattttagtagagatggggtttcaccatgttggccagaccagtctcgaactcctgacctccagtgatccacccacctcagcctcccaaagtgctgggattacaggcgtgagccactgctaactgtggtcttttaagtgtaatctatctttttatttttcatggctactcttaagaattttccttaatagttggtcttcattaaatgctttcttcaatttcactggaatagtggagactgggatttgtaagaggaagctgtggaaatggacatggggtattggtgactggtgaggaattgatctggggaaatctggatggacaagatcatgtagagagccttgagcagaaagatgatggatggaaaccttattttggggagtcgtgaagagttctgaacagggggtgacacagacacctggtgctgtggcctctgggcctactccttttcagccttagaagaaattgccagcagaaaccgtctgttaaaacagctaatcaaagccgggtgcggtggctcatgcctgtaatctcagcactttgggaggccgaggagggcagatcacgaggtcaggagatcaagaccatcctggctaacacggtgaaaccccgtctctactaaaaatacaaaaaattagccgggtgtggtggtgggtgcctgtagtcccagctacttgggaggctgaggcaggagaatggtgtgaacccagggggcgaagcttgcactgagccaagatcgcaccactgcactccagcctgggagatacagcaagactccatctcagaaaaaaaaaaaaaaaaaaaaagctagccaaagccagatacaaggcattcatttacaaaaatatacagactttatgaaaacctttgtgtcagggcctttgttagctgttttacagctaacaaagctgtatgttagctgtatgctttctttgacctttcacaataatctggttagatggaaattatttccctgccttacagagcagggacataaagcgacttgctcaatagctggcatagatggagttgaactcagttctcttggacagaagtcctgtggtctgccatatatacgaaggtatttatatagtccatttacaacaaaaacattaattttaaaagaattggacacagtgttatgggctaaattgttcccttctaaaattcatatgttggaagtcctaaatctcaatatctcagaaggttactgtatttggagggtctttaaatagttaatttatttaaattaggtcatggggaggccctaatccaatatgactagtgtctttataagaagagaagattaggacacaaacacactcagaggaaagaccatgtgaagacacaaggaggagacagccatctacaagccaacaagagaggccttagaagggaccaaccctgataacaccttgttctcagacctctaacatctgaaactatacgaaaataaagttctgtgtttatgtcactcggtttgtggtacattgctgtggcagccctagtaaccaatacactgagaggtaccatgttctctccaatcaaggttatggctttggacaattcctcacttgtgtatcttgatttctgagtactcagtgtcggtgacctttggttcctgaggttgcaccttgtggaagtgtaggacagcgtagtggagctcctgctcatcttctgagatggggccagcctcagcagggtggtctgaaactatgcctgtctggaactggtgctgatgacccttaatggaagaaaagaaaagattcagggctggacaataggttctcaaagaaagcagccaaggatcagaaagggagtagaactgatggaactttattatttatccattcatttattattttattttatttcattttattttattttatttttgagatggggtctcgctctgttgtccaggctggagtgcagcggcatgatcacggctcaggcagccttgaacacctgggttcgaatgaaccttctgcttcagcctcctgtgtagctgggactacaggcatgcaccccacctggctaatttttgtagagatggagttctactatgttgcccaggctggtcttgaaccctgggctcaaggaatccacccaccttggcttcctaaagtgctgggattacaagcatgagccaccacatccaccgcattcatttattttaaaatatttaataattaagattggcaagcccttagtgagtgtttacattaatcagtcatattctattctcaaaaaatgctttgcagtggattccatgattacattcatcttacaaacgggaacactaaggctaagagaggctccacatgttgcctatagacacacatctatataaatgcaccactgagaaggactcagaaccagcttattgttgtgtaggtcatgtgacatgtgctagatgttaagccatgaagaaagcagacacagtcccagatagtaggcagtgtggttttctatgagatgcagttagttaaaaacaggaaacaaaatcacttttttaattcatgatagcagatattttgaaatataaagcaggggcaggagtggcatatctgattcctagacaggtactggaggacagaacagagaccgggtcctgcagtacaggccaccggacgccctctcctgtaccttctctttctaatgcccctgaaaacttgaaagtaaagcatggtaaagaaattatgtaatgattcccaacaaagtggggatttaacacacactaagtgtgttatatctccaaataaaccaagaggcaatacaagaaattatggaatgagcaaataagaaaaagtgggaaatctctggggaaacaaaatattttatactggagtgtgtgtgtgtgtatatgtgtgtgtgtgtgttcagggaggcattggtgacagtgcgtgaatggctacagaaatgagatttatgttccactcatgtctttcctccatcattgggataatatattcctgcctgcattcttgctacacaaatcagtggcaaagtccgagactaaaggtgtgaatttctgcaggagaaatgacagatcagcacaaaagccctactgaatgaagaaaataacaggtggaaattgcctctccctgggcttcccctggccaccttcccccatccacacatcccagacttttggaagacagtctaggtattacctcccccagcaccaatttttcctgagggtctgaacaacaggaatcatgacttgaattattcttggtcagttctcactcaggctatggtagagtaactggcaccctcccagcataattagaaaactatacatagtatgtaaaatatgtgtttcacaaggaaaacaggcagacaggactgtgacatctgaaagaaaggaaaccaatgaggtgagtctcatgatcaaatgacaatttccaaactgcagtacgtggaggataaattcaagcagaacacaagagtcttatgaaactgtggaggcagcaactgcagttcaagtgggaatgatgtgggtggaatttgtagagcagagtacagagagaaaaaactacacagagaaagaactccaaaaaatatgcatagaggtccccttgaatctttggctgaatactaagctgtatgcacagagtgaaaggctgaaagcctgggtacgtgctgctggagaaggaacagctatgagaaagctggaatgaaggcaaatataaactcaccctgccaaagcttttgtaaaaatctttgaatggtcaagacaatccactaataaattaactgcattcgagaacaaagctcaacaatttttaaaggaagattaaaatatccggataatcaacaatgtaacacgatgtccagtatgccaccaaaatcactacctatgcgaagaagctgtggaatgtaagcaatgaaaagtatatcagtaaatagaaacatatcaccaaatgatggaattagcagaaaagaagattaaaaacggctataaatacacatattcaaagacttaggccaggtatggttgttcatgcctgtaatcccagaactttgggaggctgaggtgggcagattgatttgagctcaggagttcgagaccagcctgggcaacatggtgaaatcccatctctaatccctaacccacaaaaaaattagccagatatggtggctcacgcctgtagtcccgactactcgggagtctgaggctggagaattgcttgagcccaggaagtggaggttgcagtgaactgagaacatgccattgcactccaccctgggcaaaagagtgaaaccctctctcaacaataacaaaaacttaaaggaaaacagaacataataaggaaatgaaaactataaagaactgggctgggtgtggtggctcacacctgtaagtccagcaatttgggaagccgaggcaggagtactgcttgagcccatgagtttgagaccagcctgggcaacatggtgagaccctgtctttacaaaaatttgtttaaaaaattagccaggcgcagtggtgcatgcctgtagtcatagctatttgaaaggctgaggcaggaggatcacttgagcctaggaggtcgaaactgcagtgagccatgttcatgccactgcactccagcctgggcgacagagtgagatcctgtctcaggaaaaaaaaaataaactgaattgaatttctagagatgaaaaatggcaatatctaaaaagaaaagctaatagcagattaggtacggcagaagaaaatagcaatgaactaaaaaacgtagcaataaaaactttccaaactgaggcacaaagaaaacacaaaaacgaaaaataaataagcacagcttcattggcctgtgggacaatatcaagcattctgacacaggtgcaactgggatcccagaaaggggaagggagttaaagaattatggaaaaaacaatgattaaaatgttttcacaataccaagtcatatatccaacaatatctgcaaataccaagaaagataaaaacaaagaaaaccacacctaggcatgtcataatcctattgctgaaaaccaacaaggaaaagaaatgtgccctagggaagccagatgattggacaaccctgctagaggataaaagtagtaactctcctctcagcagtctgatggaactgggtaaaccaaatttgatgttccaggtctgataaggagaggcccagtaaacacctcaaaccttccgttaggactcaagaagggttacagattaaaagtaagggtccgctgggcacagtggctcacgcccgtaatcccagcactttgggcggctgaggcaggtggatcacgaggtcaggagatggagaccatcctggctaacacggtgaaagcccgtctgtactaaaagtacaaaaaaaaattagctgggcgcggtggcgggcacctgtaatcccagccactcgggaggctgaggcaggagaatggcgtgaacccaggaagcggagcttgccgtgagctgagatcgtgccactgcactccagcctgggtgacagagtgagactccatctcaaaaaaaaaaagtagtaatattttaaaactatcaaaaaggcaaaaaagggagataaatataaaaggacaaatataaatataaagcagagcaatctggtagaattaaactgagccaaatcaataatcacattaaatataaatggtctaaacactccaattaaaaggaagatattggcagacttgataaaataggtagaataaatgtgatatctgtaagacagacacaatacatatgaaggcacacatgtgttaaaagtaagaggagggaaaatgcataacaaacaagcactaatattaagaacactagagtggtaatattaaatcagacagtgtattttaggaaaagaaatattaccagaaataaagacatttcataatgataaacaagtcaattcattacaagatataaaaatcctaagtgcatatgcaaccaatcacagagcatgatttaacaaaataaattgtaaaaataagcagacagagaatcactaaggatatagaaggattgaacactagtgtaaaataacttgacctgattgacatttataaaatactacatccagtatcttcagaaaacacattctttgcaattgcacatgtaacattcaccatggtagactgatttttcatgtacttatactaccagttactgagataagagtttttaaaaaatcgactatggagtgtgcgccactctaatggagaggagatagagtggcaaataaacattagctcgccaactagaccatccagaaggacacgttgacattcatcaaggaagcaacatgacccggagagcagagaagaatgagacaaggcagctccccaggattggcatggagccaagggaggctccccacgatggggaaacagtgagcaagtgacagcccccaaggacccacacttctgccatggacctttgcagtcctgggcatgagagatcccctgaagcctccagactgacatggagagctgtgcggagtctgggcagggccactgctcaggcccatgtggagccccaagggccttggacctatgagcagctgggcaccaggtgtcatagcttcaccaacaagagaggccaggttctctcacatgctctcagggtagggaccacatttatggtgctgaggagctgacagattgcatacctcacctctgctacagctcgccagagaaagcccactggcctgggaccccagcatagccacctcacccctgcctgagcacttgggccagtagcagctctcgacttctctgggacagggctcccagaggtaacagacaagtctgccattttttctgccgccacagctcccactcctactcccccgaggctggagaaggagaaaagagcataaggactatcactggcctccaacacaccggaactgctttatggaaaagcagccagaccgtatcagtgtgggtccctgcccctgttattcctgactgagaaggacatcctgacccgggcccccagcacagctgccctgcccccacctgagttggtggcagttctgtgtttctctgaggaggatatcccagggtcaacccacaggctctttgccattgccactgcagtggtactgcccttgatgtcttcaggctgggaaaagaataaagaccttgatcactttgctggcacctccaacacactacaagcaccatacagaaaggagcccagtctcgcttccctgtgggacccctactccctgctcttcaccaggcagggcccctggctggggcctgcagcacagcggccccacccctagatgaacgttcccattggcagtggctctgtggctttctggggtggagctctcagagcagctggcagcccctctgccattgctgctgcagccatgctgcccttgctgccctcaggctagggaaggaacaaagagcctgatttatttggtggaacctccagcatgccacagctgcactacagagaggagcccagtctctcttccctgtgagcctccaaccgttactcttcaccaggtaagtccccctgcttgggcccacagcacagctgcctcaacccagggtaattattccaattggcagcagctctgcattcctctaggatgaagccccaagagacaaggaaaaagccctctaccactggcacttccaaggtccctgcccctgctgctccaagctggggaggaaacaaaatgcctgggctcaccacggggctgtagtgtgcagcctgagtgccaagtcaagatctgtagccagcacttgagtgagagaggagcccacactctcagagcactaggagggagcatggctgcaaatgtgaggaactacagaggattcatgtggctgaacaagagcctacctgccagccattatgcttaagcaccacctattggatcacatccaaacttcaacaccaaaaatactttgctaatataccccactgtgaaactaaggacaagaatttagcaacaaataaagatcgtgcacaaagcgttggccttctgaaaacgtccagaaacaaagccaactgactatactcaaatgacagcacaagtaagggaacatgagcccacataaatgagaaagaaccagtgcaaggactctggcaaatctaaaagccagagtgtcttcttacctcataatgaccacactagttccccagcaaaagttcttaaccagaatgaaatggataaaataacagacgaaaaattcagaatctggatgacaatcaagattattgagattcaggagaaagtagaaacccattccagggaatcaaaggaatccagtaaaacaattgaagagatgaaagatgaaatagccaccttaagaaagaaccaaactgagctgatagagctgaataactcactataaaaatttcataacacaatcagaagtattaacagcagaataaaccaagctgaggaaagaatatcagagcccaaagactggttcttcaaattaactcaggcagacaaaagaacaaagaattttagaaatgaacaaaacctccaaaaactgtgggattatgtaaagagaccaaatctacaactcattggcatccctgaaagagaaggagagagagcaagcaacttgaacaacgtattggaggatattgtccacaaaaatgtccccaacctctctagagaggtcagcatgcagattcaggaaattcagagaaccttggtaagataatatataagacaaccattcccaagacacgcagtcatcaggttctccaaggtcaatgccaaagaaaaaatattacaggcagctagagatgcctgtaatattgtaatagtgatgagcagtaatgactttgggttgatttgggctgtctactctagggcttgtgtctaccacattccttgtacttaatgcacctgacacagactaagttttgttcatttctttttctcaataatcaatgccataagaaaagactaatattccaggaaatatgataatctgacatatgaggagcataaatacccccagcaaattaactggagtacgtatttcatcagaactattagattcagttccaaatgttactattttaaattattgaaatcaatactttttaaattattactgagtcaaaaatttaaaatgtcacatgtggaaccgcagggaatgtcaggtgttaatgaagaaatgcctcagggtccttacttagggcagcattcaaaagggataatgctgaatggaaattaaggtctctgtcactcaccctggagcctgagaccatgacggggttcacatcatccgtgttttgcactggctgggctgctttcttccttctagtcttcactctgagggaacagccctaagcctttcagcctggttatttggagcctctttccccaaaagaaaaccatctccccactccctatggagagtacagaagtaattaagaggtccaggtgctcacatgagcccaagagttggaccacggtttcaaagagaccccttgcttggttcagctggtcaacggggtaattcacaccaccactaccctccctttcctcactctcgactttcccaatcaccccattttcctccactcaggttttctgagattctgccacctgtgtgcccttcccacatgaagtctttctgtgcctccctggagcccactctcacctgaagatgaagcaaacacagaggaaaaccagggttgtgatgctagctccccagactgctcccaggacaccaccagccctgccttctggtttccctataatttgaattttaagtgaactccagttctaattccaggacatcctcccaacagccattcctctccaccttccactaatgtgaccacccccatccaggactcagtcactcaccatttcactgccctgtgaacccggaaccagcctcttctctctccatgactcccccttcccccaactgcaagactgaggacgttgtgcccccagccactcttgtctgggccttggaaacatcttctccaagcttcatttctctggagcagttaggggttgaattatgtctccccacaattcctattttgaagtcctaacccccagcacctcagagcatgacctgatttggagaagggtcatagctgatgtaattagttataatgaggtgttcctggatcagggtgagccctaatccaatatgactgttgtccttataaaaaggggaaaatgtgggtcgggtgcagtggttcacacctgtaatcccatcattttgggaggccaaggctagcagatcaccaggtcaggagatcgagaccatcctggccaacatggtgaaaccctgtctctactcaaaatataaaaattagctgggcatggtggtgggcgcctgtagtgccagctactcgggaggctgaggcaggagaatctcttgaacccgggaggtggaggttgcatatgtcagattaccatgttgcagtgagccaagatcgcaccattgcattccagcctggcaacagagtgagaccctctctcaaaaaaaaaaaaaaaaagggaaaatgtggacacagacgcacatgtggacacagacaccaccatgtgaagattaagtcagaggtcgaggcaatgcttctttaagcctaggaacgccaaagactcccaggaaaccaccagaagccagggaaggagcatggaagagattctctcacagcctcaaaaggaaccaactctaacaccatacatgatcttggacttctgaccttgagaaccgtgagacaataaatccctattgtttaagtcgtgcactttgaattactttgttatggcagccctagcaaactcatacaaggacccaggcttctcttcccccaattgtcacctcttagcagactcctgacctggcagcagctgggacagagctgctctgggatgttctgggcctcaaagctgagcctgagacttgagctgaatccctggcaggggctcagggagctgttgaccaagggtccggctggctgggggtgactgtgaaggagccatggctgctgttcccatccctccagaatctcctccccaagctgccagtgcagggaggagccactgcagtgtggactctaagcctcccagaggtaggagggtcccagcagttgtgaggggtctggggagggaggacaggacttagcaggggcctcttctctgaatactatggagctctcgcccagctgcccacactctcgcgcacctccccccacactcacaatgcacaaagagactcagagagatttgcagggagcccagaggatgctgagcacggcaggtgaaatctccttcttctgcagaccctacttgaggcagctccaggaccccggtattggagatgggggtggcgttcagggcggggaagccctggaaccagctcaggtgtgcaggggggttgccgtcagcatcacagagcagccgcagagcctggccctccaggacagggagggacgaggtgttttgcaggattttgaaggctttggggagagaggtgtagagagttagagatggggtataggggcaaagcactggtgtccctctcctcctgtggggtccacactagctctgaggaggagactagtaaagtgggggcctcaggtcttcagaaaagcccagaccatttccctggagctgcccaggctgtcctgcagagagtggagcaagggctgcggacagcgtcgtggcagacaagtgccattcctggaccatggagacgcctgaggcagtaggaaaacaagcaagagagaagagggagtgcgaggggtgtggcagctcctgccgaagaggcgacaaaggctgggggtgagcaaagattcagtccaggtctttgaagtctatggaggccttagtcctggcttctcatattgatccccgttagtccccactctgcttccatctggccctggagagaacaggactggctggttcctacctgcgctgtttccttggaagatgctgatggccactttctgtggagcatctggggtggaaagaggtggccgcctcaacatccctgaggagggatggtaggcatggggccttcccctcaggagccatgaaaacagggaaaggggctctcctctttggcaaccaggtccccaactttaagctctggctcagccctgccctgtccccccacaccctcagggacccgggcgtcctggcccagcactcacaggagacattgagctggatggttctctccatggtcacaccggctccagggaacgtcacctgacaggtgaggttggtgctgtggtcctggggccgtggggtgattgtgagcaccgaggactgggtggtcctggggcccagggaggtgggggcagctgacatccaggagaagatggggggcgtcccctgctcacagacccagggcacagagcaggtcagattgctgggatggccagactccagggtccctgggatggagatgttgggcctgtgggtcagggctggtgaggagatggggacgcaggatcaggatggaggtctgaggtttcacccagggggaagcccagtctctggtccagctccttctctgagcccaacatgcttaattgtacccgcctcccaagacggggctcccgtcccagccctgccctacggcccccatgaccttcccctgtggctagtcctggagctggttccttacccatcacacgcacagagagcttggaagatgtataaccgtatttcatccatttggacttcaaccgaaagaagtatgcagcattgtccctcctccgggcatctctgatgctcagggagcagttcttccttctgggatcccagaggaggtggaatcggccccgggtctcctcctgcacttcttcgtctgggtcgtttgtggccactggaacatcagccccttccaggaaccagtagccataaccatagtacgaggctggaagggtagtgggcaatctgcagggtacgaggacgcacagaccctcctgcaccgtcagtgactctggcccctccagctggaatctccgctcctgagccagggcccctatggagacatgagggtcagctcggcccagccccacggcacctctcccctggcccactcacctgcccacagcaggggcagcagcagcggtagcatctctgaggcggaggcttcctgggctccctgcatgagcagagaaggggaagggagtggaggggaaggactgcggggaggaacgggtggctggggaggagcgcgtgatctcggctgttcacagaagaggaactgcgaagccacaagccctcggagctccactccctctgcacagagcagacggaaactttgagacccagagacctgcccaaagaagagcagaggagaagagactgtgtcccgcctcccacctcggggcttcctgtgagcaacagagcccggaccagggcctcccggggcatctgaggaatgcgaaacctgtgtccaaggccctgcccacctgaggtgcttttctgtgcaccactgtttacacctgggagctggtcactcctggccccagagagtcacagcctcatcccacgccatgagaaagtcagtcctgcaggatataggattctgtagggtctgtgggagtgtctgggacagtgaaaggaagaagggtcccaggtgcagtgtgggtgatagccactcattcattcactcattcattcattcattcattcattcaccaaagacatagtgagcatctgtatgtaggtcgggctggagaagagatgccagggacctggtccctacccttgagatgatccccatccatagcttcccatcctcagcacacaccctcactatctagctttagagctgtggacactggtgagtttgccaagtgacacagtagaatgccagatattttttaaaacatgagtatggaggtttttccttgacagctagtacgctgatttacaaaatttcaatgacatctccaaaataagaaccatgcaacatcttcatgtaaatcaaaaaggacacatattttatgaactgcagtgcagaagaaacttcttttgaattaatgttgccactcagtgcagtgtggactggagagatttttttttaggtcctcatcatagagattagcaatttctttcctgtgaaaaatctgcttctcacagttaaatgtggcacaaaagacatatttctggacaacgtgagcagaatatcctgacaaaattaaaatttttaggtctagctcacatggttttctattttcctctgtgcagtatgcatctggcaaatctctaatacctatgaggtattagaatttgccaccatatatttgtaaatttttttatttctacaaacttaaggagtagatgtaaaatttttttgcatgtatataatgcgtaatgattatgtcaggatatttagagtgtccgtcacgtgagtgcaatacattcttgttaactaaaatcacactattctgctctctaacgctgaatttattccttttaactgtatgtttgtagcacttcactcacttctcttcatcttctgtcctcccccatctgaccctttccagtctctgttgtctatctttctactgtccacctccatgtgataatatttttttagctcccacatgtaagtgagaacatgcaacatttgtctttttgtgtctgacttatttcaatttagataatgaattctagtcccatccatgttgctgcaaatgacacgatttcattcttttttatggccaaatagcatgtatactatattttctttatccattcatctgttaattgacacttaggttggttccatatctctgatattgtgaatagtgcagcaaaaatcatgtgaatgcaggtatctctttgatgtatttctttctttcccttcgggtagatacccagtagtgggattgcttgagtgatcgaatagtaattctatttttagttcctgagaaatgtccatagtgttttcaaaagtggctgtactagtttaaattcccaccaacagtacagaagagttatctttctcctcatccttgccaaaatctgttattttttgtttttttagtaatagtcattctgactgggtaagacggtatctcattttggtttagatgtgcacttctctgatgattagtgacgctgaccattttgtcgtattggctgttcttatgtattctttgagaactgtctattcctgtcctttgcccactttttacttggattatttgctttttcctgttgagttgtttgagttccttgtatagtctggatattagtctcctgtcagaagaatagtttgcgaatattttctccaattcaacaggttgtttcttcactctaattatttcttttcctggcagaagctttttgtttattaagtcccatttgtttatttttgtttttgttgcctgtgcttttcagaacttagtcataatttctgactcttctgaccaatgttcaaaagagttttccctaggttttcttgtagctgttttttttttttatagttttgggtcttacatttaagtgtatgattcattttgagtttttttttaatatggtgagagagaagaatccagtttcattcttttgtgtgtgggtatacaattttcccagcaccatttattgaagaaggtgtcctttcctcaatataagttcttgtcagttttgttgacaatcaattggctgtatacatgtggccttatttctgggttatattccattggtctatgtatctatttctataccaatatcatgctgttttggttattatagccttgtaatatactttgaagtcaggtaaagtgataccaccagctttgttcttttttctccggatagctttggctattcaggttctttttggatccatatgaattttataattgttttttacaattctgtgaagactgacattggtattttcatatggattacattaaatctttagattgctatagaccagtgtgggcttcttaactatcttaattcttccagtcatgagtatgggatgtttttccatttgtttgtgtcatcttcaatttctttcatcagtgttttttagtttttcctgtatagattttcacctggtaggtcattaagagcatattgtttaatttccatacatttgtcttgtttccagagttcctcttggtgctgacttgttgttttgttccattgtggtctgagtatacattgagtaaatattgattttttttttaatttatagagacttatttcgtagccgaatatatggtgtatcctggagaatgtttcatgtactgatgaaaagaatatgtattctgcagttgttgggtagaagttctgtaaaagtctgttagttccatttggtctatagtgtagtttaaatgtgatgtttgtttgttgattttctgtctaagtgatctgtcttactgagaatagggtggtgaagcttcccaccattattgtattgcattctatctctctctttagatctagtaatatttgctttatagatatggctgctccattgctgggtgcatatatatttagaattgttatatcctcttgctgggttgatcccttcatcattatataatgaccttctttgtctttttctactgctcttgacctaaggtctgttttatctaagtatagttactgctgcttactattggtttccatttgtgtggaatatctttctccatccttttacttttggtctatatgtgtcttttcttaaggtgtgtttctttaagctgcacactgttgagtcatttttaaaatccattcagccattctatatcttttaagaggatactttaatccatttacatacatggttattattgatttgtgaggctttctttctgtcaggttattaaacattttcttgttttaaacattcgttgtttctttccttttatcttattgtttgtccttgtgatttggtggatttctgtagtggtaccatttgagtcctttctagttctcatttgcatgattgctttaccagtgaattttttactttcatatgttttcgtgatgataaaatcatccttttgcttccaggtttaggactcctttgagtattttttccaaggctggtctagtggtaataaatttcatcagcatttgtttgtcttgggatgaatctatttctcttttatttatgaagaatagtttctttgcatgttctgtggtggcagttattttttcttttagcacttagaatatatcagttccttcttttctggtgtgtaaggtttctactgagaaatctgctcttagtcaaatggaatttcctttagaggtagctagatgcttttctcttgctatttgtagaatttgctctttaactttgacttcacacagtctgactataatgtgccaaggagaagaccttttgcattggggatctgcccggggatcattgggccttctgtatctctatacctaaatcttttgttagacttgggatgttttcatgtattattttgctgagtaggttttccaatatttctttgttttttcacccttagagataccagtaatttataaattccattgctttttgttgtcctaaatgttattaaggctatgctcattattttttgtacttttccctttatttttgtctgactagattatttcaaaaaacctgtcttcaagttccaagattcttctgccagatttagtctattattgaacttttcaaatgtgttttgcatttccttcaattaactattcagttccagaatttatatttggttattttaaaaaatatatatctctttgatcattttctcatttataccctgaattgtttttctggtttccatagtattgattttcagaattctgttgtatctcactgagcttctttaacatcaatattttgaattctttgtctggaatttcaaaaatttctttgtgattaagatctatttctgcagaattcttgtgttcctttccttgctgtttcatgtttcctgtgtccttatgttaaaatctgtgcatctagtataacagtagcttcttcctattttttaatttactttcatagaggacatttcttttttttttcatggtccaagcatgtggtgatttttattaagaataactttggttctaagaattccactctcaattctttaatgctttctgttaaaaacaattatacaacggcaaatacaaaaaatattaaattatgaaaaccaatccattaaggctccctttatatataatatacactcaaacaagtcaagatttttcagagtagaagaataaaatcaactgttatagcttagaaagcaacactactactatgagactataaaacattgaactactttaagaaaatcacaatgtggaaaaatggagcctttttttttatcaaaaagtggctcaaagcacaaaactgctcagatgttcaagggtcccaggggtttgggctgcacagtgttaaggggagagaggagactgacagcctgtttgaatcaggcttgtgagcccagcccatctgacaatttcaaagagcttctctgcctaaacattccaccgtttagtataagacaccactttacgctatttacaagtctccttttggccagcctttgtattattaattacaaataattctgcagatttgagtgagattaggaaagaaatgctttcttaattaactttttttttcagtgaacaattaattctagttaagctctaggaacagaattggtccttataaaggagcctatcagggcccttgagaatacgatcaagtggcagaattgctttgagaatacggatttcaagatctgacatctagttagataaaaagatatgagccagtcccgaatagaagacatttcttgaaaatgtatctacgttgcttgtttggtggggtgctttggctttgattctgtgtatgtgcagtagtgtactttctgtatatttctttgactgtaaacagcattagtgatatgtgtgatttctttggctagttggagcatggttattagtggagaatatggtaaagttgtgctagggacagggatgctgagcgggagagtcttcaggtccccagctttggcatcagtgggctgagcatctatctttttgccccagggtggtatatgctggcttctctgttggcagttaccagtgggttgattcttgggctttcaggttgctcatttggatgctcatagtagcaccaatggatcaagcaattgtgtgggttttcaggcccctgggcagccagcatggcattgacaatagcaatagcatgggcaagatgattctatgagtcccaagtgatgtgcattaatgttggtgctggctgcaatgggctggacaagacagcctttggacccacagttggcacttgcaggtaggcgccaggcaaggtagtagcagccagaagtttagatccaacctcaagcccccagaagaagtgctcaggtgcccaaggtagtgaattgggtcgagcaatccgcaggaccctgggctatgtgctctgtctcagagcgggagaggtgaggtgaagctgagctagatgggtttgtgctcaggtcctcaatgttgacagcaggcactcgtcattgtgggcagggtcagagcaatcgtcgggtcccaggcagaggattactgaagagggtagggccatcttgagtggtcatagcctgggtcagttgaaggtggcggaagaacatatgtccctttcacactccagtcctggaggggctcgacaccccccctcaccctggttgctggagctcccatctggcttgcaaacaagttccaatggcaatttgtgcccctcttgcatccttgtctcagatcctggcagtgcttgcttcacagccacagctgaccaaaccttgctcactttctagccccacctgcaggagcactcctggttcgatctcctgtcccagcagcaatagcttgagtttctgtaatgccccagtttcagtgtctctgggtccttgaacagcatacaatttccagaggacaagcttgaaaatgcttaagtgtcagaaaggtgtggaacccagcaggagttcccttcccggagtagttctgtccaatggtgtcctgactctctatgttagtttcatagggttgagtgcttctcccttggccaggattgctgaattccgccatggagatgtggatgactggaaatccctaactcagtcctttgtgcatgggaagtcactcccagctcccagccaatcccagccagggaggctgcctcttttccttctccttccctgtttttgatgtcctctgccacttctctggtggattccaggattttcccttggataatgtaattcgactgtgactgtctatacattactctggttcttctaagtggaggaggcaggcatgaaatgcttctagttagtcgtcttgaactacactacccttatttgaacaatttttaaacacagtagtatctagataaatattcattcatccttactaaaataagagagctagttttacctttatttgatatataagtaattgagccaccaataagtataatacctgtcctagattatcttttaagtaaaaatgtggcacataatagaaaattcaacgaaatttgttttaatagtaaataaagttatatcatgctcatagactggaaggttaaatatgaagttgtgatttctcattatgtttctttaatgaactttattaggtataattttatagtttaatttggaatttattttgcctaaaagagttccagtgagagaaacattttgacataacagtgaaaacaaaatccctcataccttaaaattaaaatttttggatatttgtaccataagcttgcccggcctgtaagaagcatcatttctactagagatttctcaccaagaataaattaggtcattttcatgaggaaaacaaacaaaactcttagtcataactttgatccatgttcaatctcctcaacaaagttttgtgtgcattatctctgtactagagatgtgaatttttaaaattagcaacacatatttttaatatacctaaagatatttccttattccttccaataattatcaataaaaggaaaggcaggtatacgtattattattattagatctatcagcttaattttaatttctaacttatatctttatctaaattgctcagtttaataaaaataatttaatgggttaagacactgccttcaactgggttttagtttagagcaggagacagaccctacgtgaatatttaacgttgcatctgggcactttttctgacctatgccagtttgccaaccagtgtttgtccaacatacaaagataggctgcatatactcagaaactgaattactgagatttcaacaatatacaaaagtcatttcatatgctcaaactttccatttattctcttatttaaggaaaagtgtgcattgttaacagaaaaacaggttcttgtgccagcaggctagtaaatctcataatttcattaaaaacactttgggtcactttgtacactattaatgggactgtacgttagcacagccattatggaaagcaggaggtttgtcctcccaaaattaaaaatggaactaccatatgatccagaaatcccatttatgggtatctattgaaagaaaacaaaagagacatttgtactcccatgtttaccaaagtactatccacaatagtcaagatatggaatcaacctaagtgtccatcaatgggtgaatggataaagaaaatgtggcatgtatacgcaagagaatattattcagctttgaaaagaaagaaaattttgtcacttgcaacaacatggatgaacctggaggacaatatgccaagtgaaataagccaggcacggaaaggcaaatacttcgattctgcttatatgaggaatctgtagaagtcaatttcataaaagcagaggctagaaccctggtgatcaggggtggaggttggagacaatgaagagatgttagtcagagggtaccaagtttcaggtagacaagaggaatctggaaatctcctgtactgcatggtgactatagctaataatactgtatcatatatttcaatactgctaagatagtaaatttccaatgttctcatcacaaaacaaaacaaatattgctggatacaaagcaatccttttgatgagtataaggtgttactttaaagtgcaaaggggttgataagtgtgagatggcaatgcatatattagcttatttcttcattacacaatgtacacatattttaaagcattatgttacatatcataaatatacacaattttatttgtctattaaaatagaataatgataaaacacaaaggaaatgtccacaaaacatcacattgtatgctgtaaataaatacaatatttatttttaattacacctcaataaggctggaaatattgctttgaaaaatccaaaggcaccaggcacgatggcgggtacctgctgttcccactattcaagaggcggctgtgaaggaggatagcttgagcccaggaattccaggctacagtgggctatgacaatcatacctatgaaaagccaccacactcccacctgggcaacaaagtaagaaccttctaaaaaatataataaacaaataaaattttaaaactccagatggaatccaaataaatttttggaattaataaacaaaaaaacctgccgttgcaaagatcatgagtgacaaaggtgcccacttctccgtctgtcctcacccctgtctctcctcatctgtggtcatcactttactccagctgtgcattgaaacatctccatcctggacccctctcctgagctccagacatttgcattcagctgtctccctcctatccccattcagatgtcagggggattctcagaattatcatcgcccctgaaagccacccgtctgcagtcctccatggacacagctctttccttccaggtgctcagaggaacattctggccccatccttgctcttcccttcccctccctgacaacactcattagaaaattctgtgagcctgaccttccactcacatccaaaaacacatccttaccccatcctgcctccctggctcagccccatgcctcctcctggatgacccagcagcaccttcccagcctccttggctgccgtgacacacgcggttctgctctgaccagagcagctgagggtcctgttagagtgagagtccagtcaagcctctgctctctccaaaggctccaggttcctgcgtagcctcagggccccacgcaggctgccctgtcatccccgctgctccctcctctgcctccttctgctctcagactggggctctggctgtgtctgcaatgcccaggcctgctgctgcctctgagcaatgcactcactgctccccttccctcttgctgggatgcttgtctctcattcagacacagagcctccctgctcagcaccttcatgcctttgctcacacaccacctcccctcattatcagataagaaacggttccccagtctatcttatgtttctttccctgcatgctttttctccaaacacagatctccaccccacatgctcttattttatttattatttcttttcatttgtacttttcctgtctctagaatgatagcttcttgaagacagagatttttttcgtgctgtgtctactgatgaacccctggtgccaataataatgctgacacataatggatgctcagtagagtcactgaagttagtcgcttcgtgtctatcaccaataatgcctctgctccactcagaaccaaataagaattacacacacacacatacacacacacatgcacacaacacacacacaaccctgagtgacattaagactgagcctgaaggacaattgggacctagattggcaggaatgggagggaagggcatttcaggagaaggaattacacacgcaaagtctcagagccacagagggcttggcctgcagagactttgggtggagagtctggccaggaacagactgtgcaaggcctccattccaggctgtggcattttccccttgttctccagcaccagagaggaaacacggctgctcagactgtggaggaactggatgaggaggcatctggaaacggagtctggagtctgtgttgggagagatggaggcaggaggtgaggagggctcagtgttcagggaggaggcgaggccccaggcatgaccagggccaagatggagaaaagggccccaggatgaaccctgcttagaaggagggacaagaattagtgatttgtgggatctggaggagggagggaggtgaaggtgaagacccatatcctggttctgactttagagatgggagccactatgtcatcagtaggatggggatcccaggagaagtgggttgggggaagaagatgggcagctcaacttaagccatactgagcagagcaatcctggaggccattgagggggaggtgtccagtgggatgttgaggatgagatgcccacaacccctgagagattagcccgtgacagggtctgcagcctccacgcctgctgctgcccttccttcctgcagaaactgacagtgagtaaaaagacaaaggcctgccagtgtggccggatcggggtgcagagggcagcagactcatctccccgtgccctgctaaggggcaggaggggactggggtggagagagcaggcctagcccccagaacctccctaatgagagcaggaacctcccagcccggacattcagtgaaagccgaggtcagacaacaattggtccatgtggaattctcgccacaattcagcctactgcctggccctcttgagccttcagattcctccagcactgggacctgggattcagcaccatgtcccctgtactccccacatctctccttggtccctggggcagcgctcagctgaggaagaggaagcagaggcagataggcaggatcttcacagccgcctccccgacagccaccaagaccacctccaccacaggccctgatttcaaaaagttttgccccggctgggagcagtggctcacacctgtatcccagcactttgggatgctgaggtgggcagatcacttgaggccaggagttcaagaccagcttggccaacatagcaaaaccctgtctctactaaaaatacaaaagaaattacctgggtgtggtggcacatgcctgtaatcccagctgctagggaggctgaggcacaagaattgcttgaacctgggaggcagaggttgcagtgagccaagatcacaccactgcagtccagcctgggcaacagagtgagactctatctcaaaaaataaaaaaaaaagttttgccccacaatgggtaggtgaatacatacacttttacccctccctgttgcgcgtgtaaccttgttcaccttcatgggttctccatggccatattttttcaaaattagaaagaacatatgacccaactattttgcatttaagaactgatttcacaggcatagatgtacacttgtggcagtagatacaagattatttattgcagtgttactgttggtaagataaaattagtgccatgatattccattaggcacaaaatcagagtccacatttttgatgccacgaaattggagtccatccacacagtggaatcacccacagtactggaggagagtaatgtcactctgatgtcactactgatgttaaaccatcactgagatccttcgggcaagcaaatcaaggcgcagcgcagccaggacagacactggcggattctggggaaggggacgggtgtctgagggtagattctactgtgcactctgaattctcacccatgtgactatatcatctgttcagaagaacttagatcaggactactggggagaataagaagatgagggaagaggagtattcagcaggtggggactcaaagcctggatctgctatgtgaatggcaccctgcccttgttatggggccagtgggagttgtgtgtggaagaggccaaggggagtgaggggaggatggggacaggtgctcaggtggccttggagactaacgatggggaagacctctgtttcacttacaagagggtctcaggttacgaagttgagtccaggaagaagcagtagcccagccctgccccaagctgcaggccctgctccctcagccccagggagggggctctgtcctacctgtgccgtctcctagagagacaccaatccttgggttccttagagcatctagaacaggaagagagaatttccctttctttggggtggagatgaggtaaaagtaggtactcctcccctaccccagaagccacaggaatgtcaaaagacagagcttgtgtccttctagttcccctgctcagccaggcctccaggacatagccacaaagtgtcccctgccctgaccctcctctaccccctacaccctcaggaacccaggcatcctggccccagcactcacaggagacactgagctggatggttctctctgtagtcacaccagctccagggaacttcacctgccaggtgaggttggtgctgtggtcctggggccatggggtgatcgtgagcactgaggagccgaaggtcctggagcccagatgcaacagggagacccccattcagaagaatgtggagggggctcctcccattcacaggcccagaacacatagcaggtaaggttcctggtgtgactggtaccccagaatccctgggatgaaaatgttgggcttgtgggtcagggctggtgaggagagagaggagcttggggaccctctgagtgttatcagcccaccccagggtcctttcacgctgtcggcatgccaccacctctagaaggagcagaaccttcattgctttatttctggtgtctgggcttttaacatacttgtcatattccaagagagcatcctacaagatatgaatgtttcctgaatggtttctcctttctgaagagtccgtgtgggctgggcgcagtggcttatccctgcaatcccagcactttgggaggccgaggcgggcagatcatgaggtcaagagattgagactatcctggccaacatggtgaaaccctgtcgctactaaaaatacaaaaattagcagggcatggtgacgggtgcctataatcccagctgcttgggaggctgaggcaggagaatctcttgaacccgggagacggaggttgcagtgagccaagattgtgcaactgcactccagcctggtgataaagtgagactccatcccaaaaaaaaaaaaaaaaaaagaaaagaaaagaaaaaaagagtccccgtgtgtgcctctgatgctcagggagaagttgctggtcttgaggtccctgggcaggaggaattggtcctgggtcctgccatgaagcatttgtcctggtcactggaggattgtggtctacatccacccctttctggaaccagcacaggtggagggttccatagtaagtccaggagtagggaaatttctgcagcctgaggacacacaggcccttctgcaccatcacaggttcctggaactgcagctgttccagaacctaagccaggagccctggagtgaggaaaagactaagccttgggctctggagcctcctgagtgggggctgctgtccccgcagcctatgcagggtcagcagcagtggcatctctgcctcatacccaggggcagacctctctgaaagggaagggaaagctacaggtgtgggacagcagaggaagcttgtggtgagaacaagaggtgaccagcccagtaaagggaacttcagacacacaatgagtccattgtaattaactctttaagaaaactgagttccatttctgcatgttgctcagacaaggcaagaggcttgccctaagtaaggcagcaacgaaggaccggagtccccaagtcctgcctcctggacttgtgcacaagtgactggagaaacaggtgccacctggccagttccccatgaatcacaggcgtgggacccccacagaggtcagtctcctagagatcagcaccagaggcatgaaagggtccacgtgaggtaagagcagcaacacttcattcattccatgtgtgcattcattctcaaacaaaagtaaaagagacagatttgcatcattcctgacgctcaactaactcaagtagtcctggaagacagaaacaatgatgggcttgagctttctccaaggacaatagggagtcatggaaggttctcatgcagaaaagggtcaccataatatatacatgtcagatagatccctccaaggccagactgcaggctaagggcctagagagaaagctgttgcgattgttcggtaaggaagaaccatgccttcaaggagagagtaatgtagtgaattcttagaattgcatgcgacctcagtgtccttttgaaataccagaagcggggctcagtcatccttaacaacttccagttctaaaccacactcaaatggctcaagctggtggccagagataagaacttagacaggcacagtgactcatgcccttcaaccaaccccagcactttgggaggctgagcgggtcgatctcttgagtggagttcaagacagcctgggtaatatagagggacctcatctctacaaaaaacaataggtaaataaaagaaccagcggcatctctcctgtaaaagcagacttgccttcctgctttttctgctgctacctttaagggaaccacagatatttacccatgaacttaaagtaaccacacccgattccctgagaggtactgccagttgccgtgtgcttttctttctcactctgcctgactcctcattcctgactcgggtgacccagggatggactgggtccccccactaattactgccccccctccactcattacaccctcattgcctggagtttataagtaaaaatctttaaacatatttcctagcttgatggtgcattgaacttgcaccctccacctgaagaactgtggctactctaggctgggtttccccccaggacacctgggagggtacaagggtggacttccagtgccagggaaatggtcaggcaggcataaagtgaacacgggtcagaaaagaaccacaggggcatctgtagcttaaacaagttgcccatgtgaggcacccatggtcatgggtcagacaaccaggcattagatcatcctccacgtaagagaaagatcctgtgaaatgtacgctgtagacaccacgtccagctctccttcatttcccattagggcagggtcatcagccactctggcactgaagccccagtttagctggggactctcaaaacaagtcaccttggtgattgaagaaagaagcaatttgagacattttcagaaagtggactttgcagggttggtggtggtgcatgacagagcaggagcaccatcatctcagactaacactgccactttaagttccagctccctttctagcctcgtgcatttcaaggaaatcacttatcttctgacaacaagcagccggaaagagcagacagtgaaacacagataagacagctcaggcataaagggatgtctgagggggaaaagtctcctgggtaaccaccaaacttcacactcatacaatgggccccagtaaaacagtgggccctaataaacacattccttcccctttaggtacactaagatagggaagctaaaagcagactcagggggtatgcctgcagctgcaggaagacgtatgggattagacacaaaactctccctcccaggtaagcaagacaaagagacacagaaacattctgagcctgtgataagctgtaccgccctgaatccttaaaaactcttagtcggtaaaagagagtgcctctgacctaactcagccagaagcccttctcaggtttagtctccaaaataaacctatctttaactgttcagctgttttttgtgtttccttcttctttctttaattcttataatgcgtgagagaggggagcatctgcagtggctcccagagccccgactcaagcagcagggacttgggggtgtcatggcagagagctggtgagatgaaccgtcagggcttgggggcaggtctgggctggagagggaggggtagggagtttcacaaagcctactggggttgtactcaggggaggtggatgtgttcaccaaggggaaacagaaggccccagtgggaggggtggggaacacacaatcttaagcttaattgtgggctggggaatggctgagatggcctggccagggaggtaggaggagaaggagctgcacattggtgacagcagtggtgagaattttatcagggatgggtgggaggggcagactgcagggggcagcggggtgagggggagtgggactcattgggatgtcttcagtcctctcctgtcggagctctgggcctccacttctgtcctgagcaagcagcaagcccaccttcatcacgaccccagagggaaggtttttttcctacctgtaccatttccttgggtggggccaatagccagattctgtggagaatctggcatctggcatctggaatggagaaagccaccattttctaccaccatgcggaggagtatggctgctctgcctctttggctaaatccatggaaagctgctgaggtggggactgctgtgatttctcctcccttctccagtcgagctcctgaccaggcgttgaatctctcaggccctgaacccttcctgtccatcctggcagccctcagccacccaggtgtcctggccaacatccaagggggatgctgagcctggtggtatgaggagctcagctgggctgtgagagagagctgtgcttcaaggtggcaggatcaccgattaaagcaacaatagaccaaactgaaagaatgaatcaagcctttaatcacagacagcagtgatagaggcaagagtctaaaccagagaatgcaccaactcttcttgtttcatttcctgccacccctctggaacagtgcacactgctggagggtcaggtggctcatggatcaacacagacataggggtcggggtcctctcactgaggagggagccctgaacaaaaggctcaggcagttccacagaccctgggaagggtgggggcatgagaagggctaggagtggaaaagaactgagtactgagtcagagtggggaaacgtgtcttcaaggttcctcctcctgccccccgcaaggtggtctcagcagaggcatctgtggaagacctctgtccaaggcctcagaaaacgaggcctagaaataaatgtaactgggatagaaatgcaaatatgcatagcgcatgactggccagaaaggtggggtccttgaccacaaccgagtgtgaagagggtggagtctcccagtgaggcctgccaggaaaagcctttgcaactgcctgtgatcgaacctgaaaagccacacctaggtttttaaccatgtgctggactcctcagatagttctacccatggatctaccgcttcctaggaaggtcacctggcatggaggcctgatgccacaatcttggaccctaggatacaggggtacactgaggacttgaagcgggggcttcagaaccccaggaagagaggtgcatcttccttcacaagcccctggcatggtgctgtttagactccaagatggctggctttaagcttaaagggatataaattatgggtatctgatacaagctacagaggaggagaaactcagaggggagaccccagagtgtcagcctggggttggcctcccctgccctcagccccaggatcctgcacctctcccttactctccagataagaaacaggtatgttcctgcctctggggctctctcctggggacccttctctactggtcacagtcagaggcagtgtcattcattgggagctatatttcatgtgatatctctgacctagagatgtgttcctactttcctgcatctggaacatctgatgctctgagagcaactgtgggtccttgggtctctgaggaggttagctttgccccaggtcctctcttccaggtttttcttttcttttcttttctttctttcttttttttttttttttttttttttttgagatggagtctcgctctgtcacccaggctggggtgcagtggcacaatctcggctcactgcaacttccacctcccaggttcaagcgattctcctgccttggcctccctagtagctgggattacaggcacctgcctctacacctggctaatttttgtatttttagtagagatggagtttcaccatgttggccaggctggtctagaactgctgacctcaggtgatccacccacctcggcctcccaaagtgctaggattacaggcatgagccactgcgcccagccttcttccaagttttgacagggcttatttgtggccacagggggattatggtgtctgtgggccccctctgggatccaaaggtgggtgtggactggattaaagtcagtccagaaaacccatggattggactggagaatgaagctgggcacagaatgcaaaggttccctcttcaccgtcactgactgaaaggtgagagcacagccggctgattctcatgggactgctgccgggaagcaagctgtggctgcagcccgactgagcaacctcttcctcaggcctctgctgccctcacagctggggcaatggcagcagcggaaaaggatgttctacattccgctgacaccatctgatttgttgggagccgaaaaggccaaagagatcgtgaccaactcagcattccactggaggctatatgatcaaacagcaaactgtttatcatgaatacaggatgtgagcaaactcacgactgcacctgccgccagaaggtttgctgagggcggtcactccctggcgccggctccttgaagttatcttctgggacatctagggcctactgttcaaggaatacagtcttgcaagcctactctagatggagcagctgacctcttcttccacccctccttctcgctatctcttttgcctaataaatatggagggctgtgtaaagttcagggcccttgtccactagaggcaaggtgccccctgaccccttcttccaaacacattcttttgttctcttgtctttgttcccgcgttcgtccccctttgttcagtcccccaaggtccgtgcagtttacaagcggtgccccgaacagtgacaggattgggcagtctacaagtagcaccccaaacagtgagagaactaggctgtcttcactgattagcctctcccacttggaagtgggcacaaccttggagtgatagattctcttcctggattgaatgtattgttcctctcccaaatttctgccttcagcaaacgctacttttgccctcagaccactacaggggaaatgaaagctgagctctcctctcccctgaccacagcagggtgggaccttccttcctcctcttcctcaccacctgaagaccaacccccacttccctcaagagagatgtggagtttctgggtctgttttccccagttgcttttcttggagccccttgcatagggtcataggagagtgagactgagactctcctaaaatggaaccctctctgtcctcagctccagccgtggctccagctctggctccagacttaggtgagctctttgggttcagggtgaggcagaaagaacttgtcctgtgtctctcctcctactctcacttcctgtgggccctgcctgcacatatacatacacagtctcttcactttgacttttccacagttttccagcctctacaactcctcccctctgtggagtgaccagcaaatattcctctcctggcctctctctctcttgaaatgaatagcctgctaggtctcccatggacagctccccatctctgagctcacgggactcttttttcaatctaagtaagatcccttgtgtgcctaaacactttgaatgtcttccatcacttccaaagaccatgcttccatcagctgcctgatattctgttcctccatttagcctacagatcctgaagcatatatacataatatatatattatatatatgatatatgacatatatatatatatgtaatcttttaggattgggcacaaagctaaagactgaaaaggaccatgagtcttgttctttgtcctccagagctccaattgggtacgagtaccagtcggaggtggtacagaggtgagaggagtagggaagaagagggagaggggaagagacacagattgagacagagagagagagagggagagagaaaaagagagaagaggaagagagggagaggggaaagagatagagaaagagagagacagacagacagagagagagagagagagaaagttttccttcaacaggaacattccctttgccctcagacaaggcaaagggggaaagaaagagactagaaacagactgagacagaaagaaaggtagagaggcaggaaaaagggagacagggagagaaagacagaagaggggaaaggggaagaaggtgaaaagagacatagactgagatagacgaagaagcagggaagagagagagaaaggggtaggagagagggagagagacagagaaagatgagcaggaggaagaggagggggggaggagaaggaggaggaggagggggaggggaggaagaggagggggaggagaaggaggaggagggagagggggaggcgaagggagtttatcacaattagacagggattcctgaaggccccgggggtggagtctgtcctaagaggcaagaaaccagggatatgtgcagattccctctctgagtgatctaagggcccatctcctgggcgtgaccgagagcccgagaagggcagacacagactgggaggttttcctatcctgcgccgttctctcccatgtctaccatcagggaccgcgcaaagaggctggtggctctcgctgcacatccagacacgttttggtcctggcgagccacaggcatcagggagagtggcgctgtccctggtgctgaagcaggactgtgtccctggtttaggaatgactgggctatgcagaggagtctgactagataggatccagatcggggtctccagccggcaaaacagctgagtcacaggattgggccgcccaagagggaggaagttaaggaggggccgactgtgggtctgtatgggctggacttccctctgtgcccctcccggctccttctttaccccaggaatgttttgggtcaaagccagcagcagctcatctgtagacctcttgttgcatgaaaaaaaaatcttatttgttaaagcccctgaaaatcaacagactcacagtaaagtgcatttctcgttgatacaatacggaggggtgaagattaccccaattccatttgaagccaacaggatattttccaaaagtgccatactcctttaaatctcctgaccatgcatgacagtgcccaatatgacagactttttttcacttttggtaattcaagattagataaataatataatctcccttccttacttttcaaagatgtgattataaacagccttgttgacccaatttttaaattaatctctgtgaattatttatttaaagagtttatgcagaggggctttggggttttccttaacaatgtgtctaagctttttgtgaagatattagtcttctcctattatttaccttggagaataatacaatttttttaaccgacaaaatatgcatccctaaatatcaaagtttaggttttactgtttttggcatttatgtaaattgcatcatattgtatgcatttttcctagctacttcacacaataatagcttaagaattttttactgtcatgcagaagggatgcaaatcattaagtgtacagcttaatgatttatcacacagcgagcacattcagctcacaaaataggtattgccagctctgaaaatgcctcaacaaactgcactcccaccatcagaacacaaaggtcccgatttactcatatctttgccacactcgctgttatttgccttcttgattttctgaaagagtgtaaagaagtatctcatttctgtttaatttgattttttttcagctaccagtgaggctgcgcatctcaacgtggacttgttttccactcatgcttccatactagcagattaatattcatgtgctttgcatacttttactttggcttgttttcctttttctcattggtttgtgggagtttcttacacattctagttcaaaagtccttgtgagctttaggtgaaacaaatgatttctctcattctgtcatttctcaatgaaagtagtctgatttgtccttgatttgatggaaaaccagagtttggatgcaaccaaatgtgtcctacaaattggtcttttttttttttttcctggttggttaaactcagaattttcgagctttaacacccctatcccaattaccccaaatcacctcagcttccctcaggctttacataggaactggtggcgacatcagtgaaggcctctctgggcaacttccggttcacattggcgtccaggcgtgatttcttcagcatgtccattgacgcgcatgttcaatatcacttttggagctatgctctgcagatagttatcatggtgtaacgcggtggagggcgtgtccgttatttccattgtaaacttttcttcagcggctttgtcaggagaacaacatggtcgtgcccagatagagttggtcactggaggacgccatcttcaaaagatggtcgttccatacagccagggaaggccttggggtctcacacagcaaggtcttggagctgtgccatactggcagggaccctgttgtgtatatatctacgcagatatgtgtatgactgacattacatattctgaaaaataactcttttatatttttacacttatttgaagggtttttttcccccttctactaaagaattcaatgtcttcttgaaaattaacaaactgcatgtgcttaggtttacttctgggctctctagtctgttccattggtctaactggtccatatgtcatttggaatatagctagcaccatacggctttgattactgtagctttgtaatgtaatttgaaatcaggaatgtgattcctccaactttgtttttcttgcttaaaattgtttggctattcagagtcttttgcaattccataagaatttggcaattatttttttctgtgaacaatgccattggaattttgatagagattacactaaatccgtatatcactttgggtagtatggatattttaacaatattaattcttctaatccacaaacatggatatttttcatttatttgtgtcttcttcaatttcttccattaatattttgtagtttttcactgtacagatctttcacttctttggttaaaatttattcctaagtattttattctttttggtgctattacaagtgggattactttcttgatttcctttttggatggattattcttggtgtaaagaaatgcaactggtttttgtatgttgattttgcatcctattactttgtggaattcatttattcattctaatagttttgtggggttgttaggattttaagacacaatgtcaaaagggtaatctcttcaataaatagtgttggaaaaagtggatatccacaagcaaaaaaatgaaactggactctctcatcttacatcctacgcaaatatcaactgaaaatggagtaaagatctaaacatgagaccagaaatagtaagactcctacaagaaaacatgggggcaaatctacctgatattgacattgatgataattttttggatattacaccaaaagttcaggtagcaagagcaaaactaaacaagtgagattgcctgaaactaaacagcttctgcacatcaaaggagacaatcaacaaaatgaacatgcagctgataggttgggagaaaatatttgcaaaccaaatatctgataaaaagttgatatccaaaatatatgaagaatgtatacaacctaatagcaaacaaacaaacaaacaaacaaaaacccaacttcaaattgggcaagggacttgaattgacacttttctgtagagacatgaaaatgaccaacaggtatatgaaaagctgctcaatatgaatggacaaaactacaatgagatactgcctcacacttattagaatggctgttcacaaaaagataaaagacaacaagtgtgttgtgtagggtggggagaaaatggaatgcttgtgccctgttggtggaaatgtacattgatacaattgttatggacaagagtttggagactcctcaaagagttaaagggaactcaatatgacccaaaaatctctctgttgggtatataccttaaggaaatgaaatcagcatctcgtagagatacctgcacccccatgttcattgcagcatgattcacaatagctaagatatggaacaacctaaactcctatcaacagatgaacggataaacaaatcactgtgtgtgtacgtgtgcacacacacacacacaatgaaatgctactagccttaaaaataaggagatgctgccattagccacagcatggataaaactgaaggacattttgctaagtgaaataaaccagacacagaaagaaaaattctgcacgatctcacttacatgtagaataacaaggaaaggtgaatacatagaaacagagtagaatggggcagggagtgggaggagatggggagaatgttagagggtacaaacttatagttatgaaggataaagaagtctagagataaaatgtacagtatggagaataaagttaataatattgtatactcaaattttgctaagtgagtagcttttaggtgctcttaccacagaaataagtaagtatggacggtgatggatatgttaatttgcttgactgtattaatcatttcactgtgtacatgtctatctgaatatcacgttgtacatattaaatatatacaatgaaaataaattttaaaaattaaaataaagaaaaataaatgaaaaccaaatactgcatgttctcacttataagtaagatctaaatgatgagaactcatgcacacaaagaggggaacagatatgaggatctagttgaggatggaaggtgagaggagggaaaggagcagaaaaaataactattgggtactaggcttagtacctgagtgatgaaatgatctgtacaaccacctcgtgacataagtttacctatgtaacaaacctgaacatgtacctccgaacctaaaataaacgttaaaaaagagaggaggtgggggagaaaagaaacttaaaaaataaaatttaaaccaaagttccagcatcattgattaagtaatttatcctttcccacagacctgttgtgctggctaggttcaccttttccccagtgatcttctacttgccctcacacatgttagaattctatactatatcagcctcttggcttccattggctgttcacacccactggtattttattatttatattgctttataataacctttgatatatagtaggacaagcctcaccattttactcttctccttcaaagtgtcttattcttagtctgcactttcacatgttccattcctctctaccctaaatgggattttgaatgaaagggtattgaaattattgattcgtaaatgattggcatctttatgtaactgggacgttctattcattaatacagcatatggatcaatttatttaggtgtttgatatcttccaacacagttttataaagtgctacatttagatgtaacacatctcttatagttccttatttttgttaatacttcaagtggtatctttttattacattttctatcaacagttactggtatataatgatacaattattaaatatatctgtattcattcgtttgctaaagtttctgttataatttgtttttacattattttggaattttccatatagaattgtatattatctttaaaaaataaaatagaattggcaaaactgaaaagtgactgtcaagaagaaaatctctcttccaaattatattttaaaataattcatcctctcccatagtgttctaaaaaaattttatctttggtatccttgcacagtttctctgtatacctggatgaacccattgatgaaattatccattaagagacaaactgtgagataatttaggaatcctgcaatattttatttaaagggaggtgaataaagaaaatgcagtcaagttaatggagaaaacacaattactcaggactacacccagccagcctaaagggacagaattttcaggatgagatttttcagtcatcaaataggcagaagtatatctaagattgtgggcaatggtggccataaagtaaacaactgggctggttatggggaaatagaaaggtgggaacacaaaagtgtggatctgagacgaactccttcttcatgataaaataaaagcttttaatgctcataggaagtacaaaagttagattggaattggaaggagcaggaatatcccacaaaataacactgaaataagtttgacctacaaattcctgattgcacaagtaaacatgtttaagactaagagagaatgatgatgcttaggaaatggaccaggaatgaaaaagtctggggtaaaatcccaaggctggtaagagggttacattcattgagtagaatccccacccacctatttattaacccatccatccatccatccatccatccatccatccatccatctgtgtgtccgtgtttccatttatccatccattcatgtgtccatatgtatcagttaaagtccaattactaaaaaagaaatcacataaatatttaaaacagaggacatttaatggcagaaattgattacgcagttgatgttagggatgaaaaattaaacagaggacaatcaggcaacctagaaatgaacaacagcaggaaaccaccaccacttctaggctagaggacagagggaaagggcagtgcaccagagcccagtaatcaggggcacccagaggctgagtgctgagcactccgagtctgagtgctggaggctcagagagggtgctgccactaccaaagagattgcacaattcagagagaagggaaaaaataaatgctgctgcttctccattttcttcctgtattttaatctccagcattagcctctcattatctgaacctagttggaagctggctaataaagatgcctgataaatgtggtctggcagaggaagtatctggagtacatagcaatgtagaggaggtgcaaggaaaggttctgagagcagagcagtcatggacggtccatccaaccatcaactatccagccagccactcatccatccatccaatcattcattcatccatccatccatccatccatccatccatccatccatccatccatctcgcccagcagtacagttcaggagataggatatgaaactggacagagattatttctggatgaaccaagtcagcaagtgattcaagatgcagagaggtgggctttagtaagagatacaggggctctgttcctctggacttcaatgtccatcttctcaccatgtccagaggagagagatcagttcagtccactctcccagccatgcttctctgggaccctctgatcctgtgagaaaatgtaagaggaggttagcagttagggctgcagagagctcaccctgaggaagacagaccaggccacttttccttggaatttgggggctcagagactgggtcatctgagcaaggcactgctcacctagtgcagcagatccaggtgaatccacagatgaatgtgcagctggtccccatgaggattcccctaatcagtgtgaaacccagggtctgtaaaacgccttcttctatagagataacggagtcacctgaaggggaggagaggaataaagtgtttctcctagacctcatcccactcacagtcccatcctagaatccaggtgccctgtccattcttcccaccaatgactcactctgcacagagaggctaatggagacatgctgggagcccaaagggtgctgagcttggcagacaaattcccctccatcacaagactccactgggggcagctccaggacggctgattctgacgactgggagagattcagggcttggccttcccaggtccagctcagcctggcaggtgggttgctgtcagtcacataaacaaaacgcagggattggttcttcaggactgacagggaggtggcattctccaaggctacaggtgctgggaatagaggggagaagagaaactcagcaagagagataccaagagaggcacatgcaggccttgggttcagatgtacagaggggtcccccttccccttcatgatgcagtttggtctcttccccttctccgttattctgttagtttagatgcagactccgtgaggtacaggaatagaggaaaggactttgtccttgatgagaatcccagtcaagatctcctggccaccccctagttcccacaccctctttcctgctatctttaccaacatctccagttaccctaaagtctaatcatttatttattcaatctgcagccctttactgatccttgtttaaatgaggtactactgagagggtatcagctcctgagggtgtcacagtctaatggttataagaggcccaggactagatcttcactctgcaatatgacaggtgatgtgatggagtgactcaggtgaaggagggtgagcaacacaataagacagaaagtcagggaggtctccctggaggaggaggggcttaagaagagtgagatggacaagtggaaacagacagtggacaatattggagcagaagaccatgctgggagaaaggaagagcagtgcaaagacaactatgactagaaatggccttggagtttcagggaatggaaattaatcctgtaagggaagaggatagaaatgtgcataatcatgtggagaacagggtgaaaagaggaacctttggcaagattatatataaatataaatgtaaattaaatataaacataaatataaatatgtgtttgtgtatatatacacatacattatgtatactatgtacattatatataatctcagaggcgggagagccagaatgataaacaaagatttacaagcaaagacttacaaactcaactacataaaacaaaacttccatggcacatccaagctaaatgaaatcaggagagaatgatgaaattgacaaacttttctgaccaatgacaaaaatactggaaaagacatttgcaattatattatggattagtggttgcatttcctaatataaaaataacatccaaatcatgaagaaaataagcacaagctaatgacaataggaaattgtatgaacagacagttcatagcatggcagaacacaacagaacggacaatgttaatgtcaattaaacctcaccttcatgcccagctagagaaatgcaattaaagctatggtgcggtacattttttatcagtagtcatggaaaaatcaaaatcattgctaacgtatttggttgttgaggttggagtgaggcaaaaactaacacattgcatgggctggggaggacgtggggattgcaaaatggtacaaccacgggaaaagccatgtggccacacctctcagaattggtaatgcatgtgccctttgatcaaataattcaaatttatacagacatattagcttccttgcaaaatatatgtaagtattatttattgtagcagtgtttataagtagcaaatgacatatatgcaatggaatattttgtagttgtgaaaaagaatgaagttctttatttactggcataaaaagatctccaaaaattattaaatttaaaaaaaataggccaggcacggtggctcatgcctgtaatcctagcactttgggaggccgagtcgggtgtaacacctgaggtcaggagttcaagaccagcctggccaatatgatgaaaccccatctctactaaaaatacagaaattatccaggtgtagttgcgggtgcctgtaatcccagctgctcgggaggctgaggcaggagaatcacttgaacccaggaggtggaggttgcagtgagctgagatagtgccattggactccagcctgggtgtcacagtgagactccatctcaaaaaaaaaaaaatagggtgcagaacagtgtatcaaggatgttttgtgtgtaaaaaagcatgctcacatgaaatttttatatttacttgtagatgaagatacacatgcataaggcatctctggatgaatgtatccaaaacagtttacaatggaggcctcagaggaagcaaactaggaatctggagggcagaggtgagacaggtgcattctatacatgcccacttatatcttttctttatgagatcatgtgaataaatcgcctgggaaaaaatcttaaattaaaattgttgaaaagtagagaggagaggctgaatgaagaggcaggaaggcaacatgtgattctcagatttggttctgttagtgttggggaaagagctgagaagttccagaaagctgccaggccaggcacagtgactcacacttctaatcccatcactttgggaggctgaggccagcagatcgctttgagctcaggagtttgagaccagcctgggcaacatggtgattccctgtctctacaaaaaaatacaaaaattagccaagcattggtggctcgcaccagtagtcccagctactcaggaggctgaggtaggagaattgcttaagcttgagaagcagaggctgcagtgagccgagatggtgccactgcactccagcctgggagacagagtgagaccctgtctcaaaaaaaaaaaaaaaaaaagtcatcggacaaaacaaaacaaaacaaatcccccagagaggtctaggtaagtgaggtccaggaaagtgtctataagatttgacaataagaggccaggcgtggtggctcacacctgtaatcccagcactttgggaggttgaggtgggaagatcatggggtcaagagattgagaccatcctggccaacatggtgaaaccccgtctctacaaaaaatacaaaaattagttgggcatggtggtgcgcacctgtagtcccagctacttgggaggcttaggcagaaggattgcttgaaccctggaggcgaaggttgcagtgagctgagatcgcaccactgcactccagcctggtgacagagcgagactccatctcaaaaaaaaaaaaaaaaaaaaaaagatttgacaataagaaagtctttgtcatggtggtgagattagggagtgttccctggggctgaaataggggacagaggatttagatttaggaagtcttctggcacctgtgctggaattcctgatctcaaccctcctatcgtgcaagctctgagacttagactctattctgaggtgttcttagattctctctaaggtgccctcccaccctaatcacaaccttggaaaggagggcttgcctcctacctgttttatttccatggaagacactgatggtcaggttctgtggagcatctgaattcaaaagatgacacatccctcttcagttttgagggttaggggagcatcctttggtcccttcccctgcccagaatccaggaccccactccaagtatcccataccctgactctcttcccacagtcactgcccaaaataactcagactcacaggagacattgagttggatggtcatctctgtggtcacatgaaaccttgggaaagtcacttggaaggtgatactggagccgtggctccagggaagtgggatgatggtgatctctgagaagtgaggggtcctagggcccagggagatgacagttccccatgtccaggaaaagatgagtgactttctgcttttccaggctgctgacacgtagcaggttcgcaggatggccagattccagagttgctgggacttggatgtcaggtgtctgggtgagggctgggaaggagagaggcaaagacctgggacacagagaggggacttccagggtgtgaactcagaagcagcctctgtcccagccccaggaatggctcccccatctgagccctaggctcctggacacagcacgcctacctatcacgttcaaagacagtgtcttttgcttgaagctgaatttcacgacaggacccctctccaaccgaaataaatacactccgccatctttcctcctggtgtctctgatgctcagggaacagatgtcagtctgggggtccccaaggaaattggaaatggtcctagcttctcttttgcagcttctagctgggtttgtttgtggccatgggaggatcccagtgttcattgtccccttgccggaaccagaagacgtagggtgggtctgagtgactccatctgtcactggggtaggagaaggagcagggcaccaggacatacaggccctcctgcaccatcaccagctctggaatctgcagctcataccccgcgtggtcctccagcatttaggctttgacattgagctcccgccaaccctcccgcctctgcccagccccctcacctccccacagcagggacagcagtagcagcagagatggcatctctgagactgcaagggctgtttagagcccccttcaggccatctgaggagcccttcccagcagacacctggtatctattttgagtttttgcctcaaacccttccctccaacagaaacacccaaaccacttttggggaagtgaaggcttagcccaattcaccgcagggccaaggacaccctagcagggaactttgttcctttcgcttccccactcagacttcagattatgccccctgaagccaattcttcaccttccctcaggagagctgtggatttggggtcattttcccaccatgcagggaaggagatgctggaagctgggtcccacctgggactgaatcctcctattccatgctcctcttcagatctgggcacgtcgggagccttgggaagccctggctgagctctcgaagttctctgagcagggaaacccgtggtgctagggttgaagcctgggggccatgaatggagcccctgacttaggtgggatatttgttgctttctgatgcttgtttgggttcaggaaggagcctggacttgcctcacagacctttcttgggtttctgtgtgagctctgactttgctgtggggctttttttcttccagaaagaacccaggaagcattgccatttactgctctcactgccctgaacgcctgccctgaacccctgctctgcctaccccttggatttctttctcttcgcaggctcttgcagcaggtcctgatgcccctccttcatgctttacccagtccttcatctgtccccacatccactaagaccgcagcatctcccttcctcatcctgcctcctcccagcagacatctggcctatgggctgccttcctgaaaactatctggcttgtggttacatgaagccagagtccacttgtggttatgagcacacgattgtcctgggccacataatgtgtgtttagcttgatcctaaatgagtttcaacctaacaccctcatctggcctctcctatctgagtctggatgtcagctacccatccgtttgacaggtattgagcacctttgacctgccccagaagtggcatcacattgacctaagaaatggcatcaaggacaaagaaaaatgaccacatcaagaccctcctacacaagaagacacgggatgacagagaaccaattctgctactgatagtggagctatggtttccaggacgagagtagatgaaggggtttgccagctgctataacaggatccagtaaatgggctggccctaaggggtgaaagtgcagattcctccctcaacccctgaggagtctgactggcacttctgatatttggggctcaggaagttaaaaaccatagaaaatattaattccccattcataatataattggcatgtactattcccatatgtgcaaattaactcttcgctgtgaacatatgcaacttggcattccacactcaaccggcataggggcagactaggagtcccatggagctgatgttcccaggagcacccctcagcctatgctggtggataatacctggtgtgggggtgagtgagaaagatcccagtagaatagcctttctcctccccactccttcctccacccatgaagactattctttattcaagagagacatgaaattggggcagaagtgtgctgagaaatatttaacaactggatttccaaaaaatacatattcataataaattttactgatataaagtatttgtagcacactgttgagcactcaatttgtcgctgttcggggtgccactatgtaactctcatggacctagggtaactgaacaaagggaggtgaacgtaggaataaaagacaagagacaaaagagcatgtttggaagaaggggtcagggggcaccttgcctctagtggacaagggccctgaactttacacagccctctgtatttattaggcaaaagagatagcgagaagtggggtggaagaagaggtcagctgcttggtccagagtaggcttgcaagactgcattctctagatgtcccagtagataacttcaaggagctcggcgccaggaagcaatggccctcagcaaaccttctggcagtgggagtaattgtgagtttgcccacatcctgcattcatgataaacagtttgctgtttgatcatatagcctccagtggaatgctgagttggtcacgtcccacgggccttcatctccctgcagcacgtaacttttaaataataataaaatgtactatactttttattgtaaattctacataatcaactgattctcacagaatgttttcactgatttttctgaacttttgcaacttgagctaacttataatggcaattgatgaacagtacactgtgtagttatgaatgttggttgatattttcatttacattaaggagtaagataaaacagaaataatgagatgtatggtgggattttattcttctgtcaatgacaggagtaaactctttgtttaatcagataagttttggaatatctacactagaagaatatttctgaatttttgtgctatttacagtgtaatgactgcagatattaacatcttttaagttgcattattaatattttattcatcactatatcaagcgtagacaatcaataaaatgataaatcaagacttgatggatagtatttgccaatttctgcagtgtaaacacttctatcatgactgacttcaagctacaaatgtgactcgtgtaaaaatataatttctgattatttccgtagaagatatttttagcagaaactggatcaccttttcaagagaaagtaatatgtttgcaagacaaagatgagtatttacaaactgctttcaaaaatggctgtaacaggccatgcacagtggctcacacctgtaatcctagcactttgggaggccaagatggaaggattgcttgaggccaggagtttgagaaaacggctgaaacagtgtccatttccccaatcttgaatgagagtaaccattgcctctctcgtttcaggaattattaatttttccagttttgttaattggcagtttggatagtcattctagacacaagaataaaggagatcacactcctgattaaaacctgtcagtgaccttcattcctccagccaaagccctcagccattttcccacataaaccctaagcagactaagaatctcattttcataggcttggccaaagtttgtcttcaggccacatgcaatttccaagggctcctcttcctttacttctgtggaaggtgcaatatcagaatatgaatgaatcagaatgatgttcttagaatcttaatattggatccatttgaacagatcagtaattgaactttgggaaaacttcagcacacttccttagcatacaatttcttgtgatgcgaatcacaactgttaatttgtattttgcttttgaatcctatatctcagagtgatgaagtctctttttaccagaggtcttagaataggtttgcttaaaatgagatatatgaaagaaaagggtcattttagtcagtgggcgagcatttatccttagctataaatgaaggtgataaacagtttcatttctgtatatagaatggtctgttcaatactatattttttgggtaaagtttcttttaatgctcttggttgtttactttctttgatttccaggaaaaaaaaaacaggcacaattgctatcagatattttgagggcaggcatcttgttgagatcattatttaataaggcgttgagtcatgaaggcagtagactggtttgaagttggccaggatgagagttcttggcatagtttaaagcaaagcatttgaaattctgaagtcctcataagttgcaaacagttgtctttattttttgaagcactttaattttgaagcacttttatttaagtttcaagaaccagaattgtttttctttttcttttttgactttcatctgcacaagactttttgtctttattttttgaaggcttttaattttgaagctctttatttaagtttcaagagccagaattctctttctttttatttttcttttttgactttcatctacacaagatatatgaagattcatagtcagaaagttttgtctgtcttcttgaggaatagccaactccaatcttaaaaaactcttctagaatgtcataatcaaatttttaaacttctaaagattagaatagatgaaataaaaaagcaaccacagactggaagaaaaatgtttgtgatatgtatatctctaaaagacttatttttagaatatataaaaaattttcacaacacaataattttaaaacacaatgaaaaatgggtggaagatttgaagagttgcttcagcaaagaggataaatgagtggccattcggcacttgaaaaaatgcttgatctgggaaatgcaaattaaaattactatgagataccactatgagatactcactaaaacatattaaattaaaaagactaacaatactaagtattgataaggcagtggagcaactagaattaccatgcatatgataaaagataactattaaaacaccaactctcaccctaaataaggaaaattcaggagcattctcatttgaatcagaaacaagacaaggatgcccactgtcaccactgttacttgacattattaaagaggttatagccaacaaggtaaaaccagaaaaataagcaagaaatgtaaaaattagaaactgagaaatatttccagtatttgcagatgatgttcaagttcccatagattttaatatcataatctaataatagagataagtcccataacttttgccatattctgttggtaagaagcaaatctcaggttccgtttgcactcaaagggatggatttgtacaaggtgtgactcagtaggtgtcaccttagggtatgcctgccccactaagagtatgagggcgcagttacccctcatcctacagatatacagatgtcccagtggagggacgccttaacttgccctgaacatacacatgcggggctgttgtacttaaagcctcctacttctatctcaattttcactctctgcattttcctttttttaaataaaatgtaccaaagccgtagggtaaatcctatgacacagtaaagaatagtctcagatttataagtggagaaaattcaaaagttctaagtccggggaatttcttagtaactcaaacaaaatgtcacactttctcacataataaagataagtgtttttattgattttacactatttgcttacagtaaatatataattgatgttttaaaataaaagcaggtttcatgcttcatgtaacaaagttaggttcagatactaatgtgaaaactcaactattcctgggaaaccatgttcaaaaaaatgcttcattggctaagcagtcttattttattattcaaatggactaaaaatgaggtatgaagtaattaaaagtaatatggtggctttaagtgcagagatggggtggcagaagctgtgaacacagaatgtaaaatcggtaactacaaaatggcacaaactacgaaagcaatatatttaaattactattttttaaaaaagaaggatcatttcagatcttcaccttcagatcctcactcagccctgcctcctatttcccataatcagccatttttttaattttatgattgctattactcaccttctagaatatatttttgtttatttgattgaacaacctcttcctgaaaattctgcccagttgggctggctgacattgatctcagtaattgtgtttttttcctttaacttgattatatttttttcattcgcctctctttaaatgaagtgtcccaagagccctaaattctctcttcaggtggtcgcttggtaggttacttcatcaataggttcatccaggtatagagagcaatggtgtaaggataacaaagatacaatttctcagaaagataacattttcaaaagtgctattaaagacagtgagttgttcagcaattcaggaaaaaaaagtctttaaatcagagggaaaaatatagagaaaaagtatttttcagaatacatgtcagtttctcctagaaatatatatacacaagtattgaataggtcccctgccaatgtaggacccaagacttttactctgtgacattccatttgtccttggctgtacggaataaaagccctttgacgatggcggcctccaatatcataatccgtatgggtgcggccatgccgtcctccctaccaagtttctgaagttgaatgaaccgcggaataaaggtacgccgttatacgccatgataactgttggcggagcgtagcttcaaaagtgttagtgggcatgcgcgcggttcaacagcgcctacggaaatcctaacgggaatgtaacccaaaccggaagtggcctagagcgaccatttagcttctgttgttaagtggatctaagcctatgtcgcttactggacgctgaagtgattgggaatattagcagtgggggttctgtagggtcaggaaggggcggctggctttgggggagtgatgaggggcttgttgggggtgggggtgcgtgataaagggatttctcggctgaagacgaggctgtgaggtgagtgacgggcttgttttggctgagcgatgaggggtttctggggtgggtgatgggtgctgtggggtaagtggcgtttgctaattttagttggataattagcctgttaattttccctcttttcttgcttattttctgcttgtagtatttttgtgacttaaattccaagtgtactttaatatcggattttatattggtccacgaaacttgctaacttgaggacagtgaacgtgcatcttaagagcgcctttgcggatggtgctggaggacgttcagggaagggattcactgtccgtgggactaggggagtcagtgattgattggcagccaagagcttcagaggttggaggactttgaggatcacactgtaacactctcaggggaccagtgatgggcaacctataggaatcagtagagtggggttgccaggggtagcctatggcagccagttgactggaggcgtagggggtcaatgatggggatttgtgagggtgaatgcattgctttctaggcagtgagtgttggggtccttcagggattggtgggtgggtcagtgttggcctcttcttgggtcccttggacatggtaaggatcagtaattgacagttgagcacatcgatgatggtttcctattggggcatttcatttggacccctatgttggggattatttgtcgttttatggaaaccagaaaattgtgctcgctgggaaacatttcttggctatcagggcagtaaagatttcagaagcctgtgccatgtcagtgactgggaggcattttggaactttctggcagccctgtagtacactcattggggatttctgaaagtcagtcctgtcagtgattgcattcaggtgcggtgggggcaacttattgtggacaggcaagaaatggtaactggaggccctgatgcatgtctgcaaattttctgtgtcaagatggggattgggacagtgattttaagttttagctctagtcagaagaggctggtctgtgtgtggtgtattatggacggggactgaaaagtccagaagctcagaataggtacaccagacagagccacctcccggcctgagttctatgaaggcaacagaaagaggaaatggtgtttctggaagctggccacgtatgggtacatgagatagtggagacagtgtacagtttagaacaaggcagatgtggggctgattccctgtttttccatttacagactgagtaaccttcaggcaaattatgtaacagcacacagcctcattatcctcatcctcaaaatgggtatgataatgcccatgatatttagctgacaattaaattgacaactttctttttttaattcatatttatcacgtgccaggcaggcactgaggacttgacaagcttcatcttggttaagtttcccaacatctgtgataaatacctgcattttcattttggaaactacaactaaagtaatattttcatattctcacagtgaaaatgtggcaaagctgcaatgaattcaccatttagtccagactcagtctttatttttaaccctgactaataactagagttgggctttctgaactttgtctactccaatgtctgacacagtgacttcacctcagtgccctcaggaaatatttgtggagtgaatgttgaatgagtgaccatgtactcattgcttttccaaggcttctgcagaacccccaggtcaggccacatcattgaggctgcaggatctctcttcatagcccagtacgactctccgccgtgtccctggttggaaaatccaaacacctatccagcttctggctcctgggaaaagtggagttgtcagcaagagagaccgagagtagaagcccagagtggagatgcctgctgatgtgaatttatcccagaagcctcaggtcctgggtccagagaagcaggatggatcttgcgaggtaaacaggggcagccctggggatagttctccagaacgtgagggcagacacaggatgcagcaggtctgggctccctgctcctgagtcagtcttgagcctcctgtcaagcgaggaccacagaggctgatgtttccacattcataggctatctgtgttctagaggaaaccatgaactggctgataaaagaggatagtagagggttggccttgggtcaagaaagaagaaactgtagtccctggtctgatcagaagccccagtcataggatggaaaagctgactctttcctgctaagcactggttctgctccttcatccaccactgggtctttgaaaaatttcaagtggtcccccccaccaaattccttgcttggtccatggggtttggcccgtttttcctctgttctcataaggtgcggcaaaatctccttcctttgtaatttaaatagtcacagggaggtagagtgagaagaggcttttaaggaccatgtgaagaggcttttaaacactttttcctgtttaaaaaggtgaacaaaaaatgctggaaaacagtgtttccagattgcccacagatagaaatagtcaggatttggtaacaagaaatcagaattcttggtatagtcaagatttcctgaaatcctaaattattctgtgtatctcttgatgctttatttacaagtctttaaatagtatgtgactataatagtaaacagtgtaccattgttctgtgatgggtttataaccaaatttacagagatgttctgttttttaaaaaaagtataataaatatgtgtgttattatcctgaaccaatatattgtgagattatatatttcagtaacctgttaaaatcatctcaacctgctagaaacatttgataatagaaagtattaaaagaagggaacattaacacaaaataaattgcacatataaatcattttcaaaattgtaaataccccaaatatttaaaagtcgttcttaaaagaaaaattgaaacatacaagtttaggtggggcacagtggctcatgcactttgggaggccgaggcgggcggatcacttgagcccaggagttggagaccagcctgggcaacatggcgagactctacaaaaatacaaaaattagccaggtgtggtggcatgcacctgtagtcccagctactgagtacgttgacgtgggaggatcacctgagcttgaggcggtcaaggttgcagtgagctgcaatcatgacactacactccagcctgggcaatagagtgagaccctgtctcaaaacaaaacaagtttaaaacatgaaattgtctaagtctttgtgacagcagtgcagatgcacaaacgtttctctcatttgcattgatgttggtcaacttgcgtgttcagaacatcttcaagtttagcgttttaggacacatgttcaatataagcttttttccttttttaacaatgaaattttttttctgcttgacctgatttccagtttatcatttgaatcaatactgctgtcgctaattcagattttccatcagtgtctgaattcatgtcagagtatatcccagtaccatgcacattatcttctctttgtggtgtgtatttccctctgctctggacagtactatttttattttgttatttttatcttttctaatgtgatggaaataaagatagtatagtgttttaatttgcattactttgtttacaaacaggcttttttttcataattttattggtcaattacttgtctttagtgagttactttttcttaccttttgatttatattttggtttggtttagcctccggatttttagagaggtttttttttttttttttttttttttgagacggagtctcgctctgaagcgcaggctggagtgcagtggcgcaatctctgctcactgcaagctgcacctcccgggttaacgccgttctcctgccttagcctcctgaatagctgggagtacaggcgcctgacagcactgctggctaatttttttgtatttttagtagagatgaggtttcaccatgttagccaagatggtcttgatctcctgacctcgtgatccgcctgcctcagtgtcccaagagagttcttacacagtaataacctaaggtcctttttgcatatgtttgtaaatactttttgttactttttcctttgaaagtaggttttagttttgtttgaacataggaaagaggatcagatggttttgtgaagcctgtaatcttttaaaagggctgtcacttgctatatttttaccaaagttccagctcctcccaggcaatcacattttacatttttagctaattattttggcatttacctcctaatcttttagtgacatgcttatattgctgcctcttggattgttaattaacacgttaattaattaagaaacatgtcattaaaaggtttgcttttacccgcttcctcatactttcacccccaacacctgctttccttgcccatccttctctagaactggttcagattctgatcaggtcaatcttccttgtttgtgattatgactgtgtaaactatattcagagctgcctgtatagacaccctgataactctctgcctgcataacttacggtttttccctggagcacacaattttatggattatttacttgcctatatacatgttaatgtattataccattttctccaagtgtgtacacactgtcttcataaattgaatttgttactaggtaattgcaaaccctcgctatttcagggacagtttttttttttgtttttttttttttttgagacagagtttcgctcttgtctcccaggctggagtgcaatggcgcgatcttggctcactgcaacctctcctcctgggttcaagccattctcctgcctcactctcctgagtagctgggattacaggcacttgccaccacgcctggctaatttttatatttttagtagaaacagggtttcaccatgttgggcaggctggtctcaaactcctgacttcaggtgatccgccagcctcggcctcccaaagtgctgggattacaggcatgagccaccacacccggccttcaggaacagttttaatcctcataactttgcgaggtactgctgccattatcccccctttacagacaagaagactgaggcacagaatgaaataagtggctcaagtttacatagtcagcaagcagccagcctgggattgaaggcaggcagtttgcttgagggttggggctgtcaatgccatctccttgaggaaacctttcctattgcttttttgtcttgatgcgattggacctggctgttctcctggcgcctcacgctgtcttctcatggtgctgtgttcaccatcacctgggaattctttttttctctgtcaagtgtccagttccttgtgtcttgaatcctttcttgaatcctttggctttctcttccacggtttaccgttactctcatttcgtgaaagtgcatcccctaggagttcttggggacggtacacggcagtaaatcctgtgagaacttatctgaacatgtctgttcagataacggagactaaacttaagaataggagaatcacttgacccaggaggttgaggctgcagtgagctgtgatggcaccactgcactccatcctgggtgacagagtgacatcctgtctcaaaaaacaaaaacgaaaacaaaagacctgagaggtttacatatatgagcatgacatgaaagtgaaatgatatgaaaatgaatgatatgaaaatgtcacgccaaaaagcaaagatcatatatttgcatatttaatagaaagatgtcacggaaaatgacttgatttaccctcacactaagttgatctttgcctgggttcataggttggaaatcatttttttcttcctaaaacaccccatatactacttccttaccacacacatatagtctctctgctctcaaatcctgaaactctttatttttaagctgttagtctccatttaaaagggtttttatgctctgtcattttctatttctttggttttggaccctctttctggaagaatttctcaactttattttctagccctccgataatcattactgccttaaaaaatttttaagagcttttagatatgaatactccttttaatgacatgatgtttttgtttaatgattgaactatcttacctaaggatatttgagatattttaaaatgtaattttatgaatagataatacacagcattcacaaattaaaacatcatgaaaagtaatttttttacaaaatactcctttctctctcttttttttttttttttttgagatggagtctcactctgtcgcccaggctggagtgcagtggcacgatcttggctcactgcaagctccgcctcccgggttcacgccattctcctgcttcagcctcccgagtagctgggactaaaggcgcccgccaccacaccaagctaattttttgtatttttagtagagatggggtttcaccgtgttagccaggatggtctcaatctcctgacctcgtgatccgcccgccttggcctcccaaagtgctgggattacaggcgtgagccaccgcacctggcatacccctctctcttttgtccctgatttgtccaggtttcttccacataggtaattatagttagtcatctgcctttacctcccaaacactaccactttcttccaaagttaactactttcgtcacttttaagttaattacttcattttaaaaaacgaggccggatgcagtggctcacgcctgtaatcccagcactttgggaggccgaggcgggctgatcacgaggtcaggagtttgagaccagcctggccaacatggtgaaaccccatctctactaaaaaaatacaaaaaattagccaggcatggtggcgggtgcctgtaattccagctacttgggaggctgaggcaggagaatcgcctgaacccgggaggtggaggttgcagtgatccaagatcatgccattgcattccagcctgggcaacaagagtgaaactccatctcaaaaaaaaagaagcaagccccagaatgggaaaagattcttgttacacatacagctgacaaaaggttcctataaaacgttgaggacggctgggcgtggtggcttatgcctataaccccagcacattgggaggccaagatgggaggattgcttgagcccaggagtttgagacgatcctgagcgtcatagggagaccccatctttacaaaaaatagaaaaattagctaggtgtggtggtgtgtgcctgtgatcccagctactcaggaggctgacacgggagaatcacttgagcccggaggtcgaggctgcagtgagctgtgattgcaccactgcattccatcctgggtgacagagtgacatcctgtctcaaaaaacaaaaacaaaagacctgagaggtttacaggacaatgagatactccttcagaaacacagaaatggccacgtgcagtggctcacacctgtaatcccaaaactttgggaggccaaggtgggtggatcgtgtgagctcatgagtttgagaccagcatgggcaacatgctgaaaccccatctctacaaaaaatacaaaaattaaggctgagtgtggtgactcacacctgtaatctcagaactttgggaggcagagatgggccgatcacttgaggccagagtttaagaccagcctggccaacataatgaaaccccgtgtctactaaaaatacaaaaattagccaggcatgttggcaggcacctgtaatcccagctacttgggaggctgaggcaggagaatcgcttgaacccaggagtcagaggctgcagtgagccaagagcatgccagtgcactccagccttagtgacagagtagactccatctcaaaaaaaaaaaaaaaaaaaaaaagctggacatggtagtgcacgcctgtggtcccagctacttgggaagctgaggcaggaggatcgcttgagtctgagaggcagaggctgcagtgagccatgctcgtgccactgcaatccagcttgggcaacagagtgagattctatctcccaaaaaaaattttttttttttgaggaaaagtgttttttaacccagtagaaaactgaagaagagacttgcttgaataggctggtaaacatgggaagatgctcagcttcattagtcatctgggaattgccagtgtaactcccatgcctgtaccaaaatgcatacagttaccaacactgataataccaaatgtaggtgaggatacagagcaaccagaaggattttgtgtgctgctggtaagcatataaattggtacaaccaatttggaaaatgatttctaattttctactaaaggcgagcatgtttttcccatgacccagaattccacccctgggtatatgcccaacatctgttctgaactggtatttaaatgtagacctgtgctgtccagtatggtagccactcaccacatgtagctattgagcacttgaatgcggctggttcaccctgagatgtgcttgaagtataaaatatatgctgacttctgaaaacttagtatgaaaacagaatgtaaagcatctcatctcgatgatttttaaaatattgaatatagaatattcaatatatagaatatagaatgttttaatatatgtaatattaaaatattacatatagaaatgataatgttttgaatataatggattaagtaaaaatatcattaaattgattttatctgtcttttaaacatggctactagacaattttaagttatatgtgtggctcacattcacggttcatgttttatttccattggatggctctcctctagaggcttgatcagagtccacttggatttctttgtttttggaaatgatacttaatagtttgcacaccacgtattttcctacctctctacttttatttttttattttgcatcatattaggtgcactttaatatctggttatctctctccttgtgataaaattgatgattgggttcagatattgtcagcctactcctccattataaagacccatcagtctttcatatggttttagcagtcattggtgatcagtaacagtgacatttttgttttgtccttcaggctgcatttatcatctgcagtacttctgtaatgaagatctttccatcatcagtcctttcattaacctaatattagttattacaggagagatcatcttgttgaaatattatatgatcatatctcttccctgcacttaaaatcctgaaatggcagtccgttcattaaaataaataatccatacccattatatattgaggcaccagcccacttctttggagcttggatggtaaccaccttccaaacatgacatagtcgcctcttatcttacacagagctgtctgcttctccctgaattcacagtgttttcctacctctctagttttattcatgctcttttctggaaaatgatttccttcacacatcctgcatcacagttcttacttccagcgtaagcttcaccaactctaagtagcattaccttctactcctaggtagaatttgcctttccctaatttgcccttccccaacagtgtcctctgcatatatttctaccatgttccctttttaaccctgtagttgagcttttgtatttacatgtcttccaagtctctgagttgctgcaagagtagaagcttatgtaattctgtgttgagcaccagaacccagctcaactacagcctcacatgtagttgcttcgtcaacatcatgctggttattcctaaattagctaaaggacttagagggaacccatttctggcctcatttttgaaaaaaaaaaatgaatgaatgaatgtaggtgtacagtggatggaggatatttctcttatttttttttaaatccctaaaaatgtgaaataggtgtttggtgggaagcctctgtgatggatcgtggtgaaaatcattaaaagcatgttcctcctatatgtgccatccccactcgccaatgatgacctaattcacagtgagctggggtacactgttacaggcatcagtgtcatttgaggacgtgaccgtggacttcagcagggaggagtggcagcaactggaccctgcccagagatgcctgtaccgggatgtgatgctggagctctatagccatctcttcgcagtgggtgagcacaactgacctgggaatcttggctggatcctgttgaggagatttccttcctcctcattgcagaacgcagtgggatatcaaagtatgtcatgactcttttatcggtttgtcctggattgtttgtttcttttgggcaccttctagtattattttgtgcccagtggaaaatgttgacttttctaatgagccagtgtaaagcttcattgaatggcctctaaaactgaagaagctacacccaaatccagtatcctttctaattaacagggtatcacattcccaacccagaggtcatcttcagaatgctaaaagaaaaggagccgcgtgtggaggaggctgaagtctcacatcagaggtgtcaaggtgagtaagttgtacccgggcaaatgtagatatctttgcagggaaccattaccagtctaccatacttttctattccctccattcccccagtgatggcccgtagattgcctcctactcccagtttcccatcaaacactgtaaatgtgctataaatgttaaatgtcctataggggctgccttaagaattttccattggtgaatactcaggaatgggattgcctggtcctggagataagtatacttgactaaatcaaccatattgctcttctgatgggctgcaccagttcacactccccatgtgcagtgcacaaggatttgcatttgcacatcttgcttgctaacacttggcattaacaaaattggtgaatttatagccctactgataggtgaaagggctgtttcatttttttttgtttttggttttggtttttttgagacagagtctcactctgtcacctaggctagggtgcagtggcacgatcttggcttactgcaacctctgcctcctgggttcaagtgattctcctgcctcagcctcccgagtagctgggactacaggcacccgccaccacactcggctaattttttgtatttttagtagagacagggtttcaccctgttagccaggatggtctcgatctcctgaccttgtgatctgcccacctcggcctcccaaagtgctggaattataggcgtgagccaccgcacccagcctgtttcattgcttaagtgttatttttctaataactgaatggtgagagcctctcatcttatctgttatctgattggctttttcatttgtttgttgcattttcttaccgcttatctctttacgtccatggagttttctgccttttttttccagtttttttgcccctaattttatttattttcttttctttgctggatctgctgtcttcttttcctcccagttgtggcacctctagcttggggccctgttcttccatatgggcatcttttcttttttttgaggcagagtttcactcttgttgcccaggctggagtgcaatggcacgatcttggctcaccgcaacctccgcctcccaggtttgagtgattctcctgcctcagcctcccaagtagctgtgattacaggcatgcaccaccatgcccggctaattttgtatttctagtagagacggggtttctccttgttggtcaggctggtctcgaactcccgacctcaggtgttccgcctggcttggcctcccaaagtgctgagattacaggcgtgagccaccgtgcccggctatgggcatcttttcccacaggaattgacttaaaggacccatccattctgaactcttagtcctcatatttttattctaatgatttatatatcagtacctctagtccctgtgcttaaactgtgttctgctaccttacttagctccacggaggacagttcccatgagatgactcacttccttaattttgggagatcagaaattggaatcatcatcatccaaataaggaattctcacctgataaattttgtgagatttttctgtttctgggctcagaaacacagtcctctaatttaatttattactttggaattcttaccagtttttcttgttttaattaagaaaaaagtgaccctttttcttaatcccagtggtattacaacaaactagatccccattttctcatatttagacaattttgttcccagtgagatatgttgatttcaggtttttgagtttagtcaagatactgacagattttatgaccccaaacatggctattttgtttcttttttcctcagtagatatgataaaaacaggcagttctatttcctactgtgtaggattaacaaattcttttcagtgatattgtcctcatggccacatatttccaatttaaaaatatacctgaatagttttcatcactcatgctctgctccattgtttttgtatgttgtttaatgtctactccatagaatgattcactttgcatacactctgctgattactttgtactttcttaatcttcattatatcaatgtttagcatgaggaaaccattgtatttaagatataggattaggatttttgtatttaggatacagaaattactgattttctgaaaatgggcagaaaagaatatttcacagtattttaaaaggatgctttaaatatttgctgagataaattcaaaagaacggagattgtatttggatggagaggacaatggcattaaatgttaaaagtattagcctttgtgcatcaatcatgtctatttcatggaaggctactcaaaaagtaagtgtatcaacatgggaagcatggatagcaaatgctggtgaagttcagaaaaatgatgtcagcctagaggtggagtgacattgggaattaattttaagggcatagtacctataactggttcaagaagccattttgaattgaaacaaagaagcagatgaagcaagcttaatgggaatagaggacatgagagtgtgcttggatttgagaataaattggacttcttttttgcaatcgacattgttaggctgtgttggagagttgtggaaaagcttttcagtacagttctgatagtttacattgaacattttgggcagtaatttaagtgttaccaggttcagcaagatttttatgacctgaataaagtgagaagttaaaaatgtttcagatcgctgcctggggacacagtggaagattgccagaataaatgaccacctgtatatgggtaaaattgctatttaagagtgaaaaatgaaatagaaaacaacctattttaataagtgggaaaaggatgtgaatagacatgtcttcaaagatgatatacaagtggccaataataggaaaaaatgctcaacttcactaattatgtgggaaatgcaaatcaaaaccactgggtgatatccctttacatccattagaatggctacaattaaaaaaacagaataacaagtgttggcaaggatatagagaaactggaatccttgtgtattactagtgggaatgtaaaatggtgtagtcctatggaaaacaggatgatgatttctcaaaaattaaacataaaattaccatatgatccagcaactccacttctgggtagatacccacaagaattgaaagcaaggacccaaacagctgtttgtacactcttgttcatagcagcactattcacaatatccaaaaagtggaattgtccattgaccaatgaattggtaaacaaaatgtggtctatacatacaatgaaatattattcagccttaaaaaggaagaggaattatgaaacatgttgcagtgcggatgaatcttatcatgatgctaagtgaataagccagacacaaaaaatccaaatgtatcattctacctgtatgaggtactttaagtagtcaattcatagagacagaataagattgtggctgccagagaatgagggatgggggaaaagggaaattgtttaatggatacagcatttcagttttgcaagatgtaaaagttttggagatccattgcacaacagggtgaatacaggtagcactactgaactgtacaatacaaaatgggcaagatggtaaatgtaatattatgcacttttgctacaataagaaaaagttaacaataaagattaaaagtgtcctttttttaaaaaaagaatgaaagatgattgagtttttttgataggacaagagtctgggatacagtttaagtgactgaaagcgaaaagaaactacatgtgatgttcatactcagtattaaaatctggtagaaaaagtaatagtaaaatttagtaactattatttttattgagaacctgctgtgttttgtgcagtatactagtaaagtgcacaggatgatcagggactcttattcttggcaaaaaaacaaaacaaaacaaaaaactaaactaaaaaaggcatatttgatagcataaagccaaaagttctaacaaagaacaattaatttcaatggaacaagggtgaaacaaattctggggaacagcttgcttgtccagtcttttagaatatatttctggggatatgggtatattcctaagttcaagaaaaaaaaattgtagcttcatggagagttgaggcataggagagttgaggcatagtcattctttcactggttggccatgtcaagataggtgaagctttaatagttttcagaaggatatacagggctgatggacttggcattgtttctaacaagtaagataaagcaggcagattggtgaggattcatctctgaaagttaatgaagacctacacactgagccccctccttcaagccttggctgcccacacatgttgccctgcaacacttgtctgttttatcctactcatcctactagatctgggtgtctagaccacttgcataagtgtcctcaggttgttgaaatctaatccccacagattagcaaagtgatcttggccaattacataaccattatgtgcttccttttctttgtaaaacaggaacacccatcatcgctacctcctgaggttattatgcagattaaatgagtatgtgtgcaccatgtaggccactgcctggcacatgctaagtgctatgtagataaatgctcatcatgtaataagggctctgtgtttctgctcattgtcagcatcattagcagcattattacatgactcagcaatttccttgtgttctgtgtcaatcagcttcatgcagtttctcctctttcttgttcattgtgtctatttcatcttctctttctccttttagaaagggagtttgggcttgaaatcccacaaaaggagatttctaagaaagcttcatttcaaaaggatatggtaggtgagttcacaagagatggttcatggtgttccattttagaagaactgaggctggatgctgaccgcacaaagaaagatgagcaaaatcaaattcaacccatgagtcacagtgctttcttcaacaagaaaacattgaacacagaaagcaattgtgaatataaggaccctgggaaaatgattcgcacgaggccccaccttgcttcttcacagaaacaacctcagaaatgttgcttatttacagaaagtttgaagctgaacctagaagtgaacggtcagaatgaaagcaatgacacagaacagcttgatgacgttgttgggtctggtcagctattcagccatagctcttctgatgcctgcagcaagaatattcatacaggagagacattttgcaaaggtaaccagtgtagaaaagtctgtggccataaacagtcactcaagcaacatcaaattcatactcagaagaaaccagatggatgttctgaatgtggggggagcttcacccagaagtcacacctctttgcccaacagagaattcatagtgtaggaaacctccatgaatgtggcaaatgtggaaaagccttcatgccacaactaaaactcagtgtatatctgacagatcatacaggtgatataccctgtatatgcaaggaatgtgggaaggtctttattcagagatcagaattgcttacgcaccagaaaacacacactagaaagaagccctataaatgccatgactgtggaaaagcctttttccagatgttatctctcttcagacatcagagaactcacagtagagaaaaactctatgaatgcagtgaatgtggcaaaggcttctcccaaaactcaaccctcattatacatcagaaaattcatactggtgagagacagtatgcatgcagtgaatgtgggaaagcctttacccagaagtcaacactcagcttgcaccagagaatccactcagggcagaagtcctatgtgtgtatcgaatgcgggcaggccttcatccagaaggcacacctgattgtccatcaaagaagccacacaggagaaaaaccttatcagtgccacaactgtgggaaatccttcatttccaagtcacagcttgatatacatcatcgaattcatacaggggagaaaccttatgaatgcagtgactgtggaaaaaccttcacccaaaagtcacacctgaatatacaccagaaaattcatactggagaaagacaccatgtatgcagtgaatgcgggaaagccttcaaccagaagtcaatactcagcatgcatcagagaattcacaccggagagaagccttacaaatgcagtgaatgtgggaaagccttcacttctaagtctcaattcaaagagcatcagcgaattcacacgggtgagaaaccctatgtgtgcactgaatgtgggaaggccttcaacggcaggtcaaatttccataaacatcaaataactcacactagagagaggccttttgtctgttacaaatgtgggaaggcttttgtccagaaatcagagttgattacccatcaaagaactcacatgggagagaaaccctatgaatgccttgactgtgggaaatcgttcagtaagaaaccacaactcaaggtgcatcagcgaattcacacgggagaaagaccttatgtgtgttctgaatgtggaaaggccttcaacaacaggtcaaacttcaataaacaccaaacaactcataccagagacaaatcttacaaatgcagttattctgtgaaaggctttaccaagcaatgaattcctagtgcatcagcatattcataaatgaaatatactccgagtttcttgaagaagagaaaatcttctcagaatcaggtctaattatatgttattgaattcatgcttcagaaaaactctagggatgcactgcatgtgtgaacacatgataaaaaagtcatgctttattttagtgagggcaattacagagaaaagagtaagcagaaatgtccttctgagtactggcctcattaaggattataaattttctccccgggaagaaaccctgactaacgcattgagaaaagcctttctgtaaagaatggtacaagacaggttgttactcgattatttatagtaaaatatgtgggaaattatatcaatgataaccctgtttattgtgggatatcaatatttttaaagtgccaacacagtcatgataggacaatattttatgtgtgtgtgtgcgccttatgtatataagcatatatataatatataagcatattattatatacaggttgagtatcccttctccaaaatgcctgggatcagaagcattttggatttcagatacttacagattttggaatatttgcattatatttattggttgagcatccctaatctgaaaatccaagattaaatgctccaattagcatttcctttgagcgtcatgttagagttcaaaaagtttcagattttgggttttcagattaggaatacccaacctgtatgtacgtatatttctgtatctatgtatgtatatatatgcatatgcagacatatgtatatggtctggtcagcatatgtgtatgtatgcgtatgtatgtatgtatgtatgccctcagtgcagtggggtttgctgcagaattcactgcatagcaggagatgtaagcagatgagttattttttaagagaatctaatctaattgtttttataaaaattattccctattgaatatttatataatgaggttgtatcaacaatgattaactcctttattatacatacacatgaatgtgcatttttggtaaatgcataaatgagattctataatgtttactgatctttatattacagattttctcttcttttaggattagctcagcttgccccccctttccatctccaccatctatagtgagcctctccataattagtgccaaccattagtctcgttcatatttttacaccaggagtcaacaaactgtggccattggccaaatatggcctcccaactgtttttttaaaataaagttttattggaacacagccatgttcatttggacatgtattgtctgggcttcttttgtgctgcactggcagaattgagtagttttggcggagatcaaatagcccccaagctggaaactgaaaatatctactctctggctctttacagaaaatgtttgccagcacatgatacacacacaaacacacacacatacacacatattactatgttcatcatcatatacctgtgtaagtactctttcattgatttataaaactcagatctcttacgtgtgtggatggtatttttttcattctacaatccatgatggattgtacacacgtgtattctatgaggttgacctgccataatttatttagccattcccacagttttgattacttatttcctccccacacacattttttgctaaaaaacggagagggaactgttatcaatacttccgagaagcagaccagcataatcttttaagtgcacaggcccaggagccaggttcctgcatttgattcctggctccactctctaccctctgcatctgctgagcaagttatttggtctcatctattctggttttctcatctacaaaagggagatgatgatagtaccctacccccatgcatttggtgtgagaagtgtgtgtgtgttaaacccttggaactgcatggacagaccaagtgctgatgaattttagcgggcctcgtatccctgagcctgcctggttcccttgtgctgggtgtgggactgtggtgggagatttctgtcagctggaagtcttttccagaagggtgttagagatgggcacccatggctttagtctccataccccttcaaggttgataggggcccacacagctggtcaggaaccagcacagacctcaggctgtgtctaaaacaaggtgactgcacatgcaggagcctgtgctgggccctggagagcaaatctgttctgtgtctcactggcctctccctgtccaggggcgtagtatcagtgaccatgtcccacctcctgagaaaggtggaagagtctcacctggggagtccaggtacaagggctggccggccgtagatgactggtgtggggtggaaaggctgcagaggcctctccatggtggtgaggggtggaaatagtgtgcacctgggtcctgggagtggcaccctgaccagtttcagggaggaaggtggcagggccctaggacaagtgtgttaaaaacttgagcccacagtgtagacacactggttccaaagacccctcaggatgtgcctcccttctcagatctgggctttccctgttcctaagcatcacctggggggatcactctgggtcctcatctccagccacatgttcactcctcacgtgggcctccctaactgtccccctcagggcaagcccttcctccccacttccagaaagctgctcgttccctggccatcccacacctctgacctcgtgccacttccggggcctgttggctttaacaacttagtttcctccctacctcgcaaccccctctgtctagagtgctcacctccctcccagcctctgtctcatactattttttctttcctctcagtaccaagcgctgggacaagccagtctgtactcaatgcctgtgggataatagacggaggaatctggagtttggttgggtgattagctttggaattgatgggtcccagggagctatctaaagttttcagtcacatgagggcatgctcacagatctgtgaaaagatctgttggctcagagaactaagagatgaataaatgttagtccaatggcctcatcatgagatgagaggtcaagagttttgagtttccagagggagaagctactattctaggcagcttgtatgaactaactcgtttattcctcacagccattgtaggaaataatctaacctcataaaccccattttagagatgaggaaacaggcttagagaatttgacgtaaactcaagaccgaaaatctaggaacaagaaaagcctggatttgaaccaagctatctgatgccagtgttttaactctcaaccattgtactactttacctcctcatgaccttttttttttttttcttgtgagatggagtctcgctctgtcgcccaggctctggagtgcagtggcacgatctcagctcactgcaagctccgcctcccgggttcacgccattctcctgcctcagcctcccgagtagctgggactacaggcgcccaccaccatgcctggctaattttttgtatttttagtagagacggggtttcaccgtgttggccaggatggtctcgatctcctgacctcgtgatccccccccctcggcctcccaaagtgcccatgacctttttattgttgggcagtgaaagccatggtgaaatgaagaatgtcctactgtcatgtgatgtgatcagaaaacatactgcccagagtcccctgcccccacccccaaaaccagtacttgatccatcctttgactgttgtggcgattggcacaaaggttgggcacagtagtagttaggctcatgggctctggagccaacctacctggatgctacacatcccagctctgcccctcgctagtttggtggcaagcaacttaacctctctgccttaatttctccagcagcacaatgggaataataatagatctcgccttgtggctcctttgcagattacatgcgttaattatgtaaagtcaagcattagaatggtggctgtccaccatgagtacaacacaaatgctcgttcttaatgattcaacaaacatggaatttcattaaatctgaaataaaggtattttgagaaattgaattccgttatcaagtgtgaagtcctgatccagactcacctcgtgcacactatttaccacaaaggtggactccctattttaaatgcattcacttaaagagacctttccctgtactaattagtgtttgttaagaaggaccttctggacatagttgaaagaaagagaaaagaagcaggtgtggggaggaggagaaggagaagggaggaagggagggaggggaaagaagatggatggacagatggaaggaaggaattagggatggcagaaaggagataaaataaactctacttttaaaagaaaccaggtggggtgagtgggagggcttccctgtgaccttggcctcaggggctctttctggcttccagataagatacccctcagctttgcactgggtctcctgaggcttggaagttatgtccacagtgaggttggtgtagaggggcagccactctttggagagcaacctgtagcccagacagttgatgccatcatcagaggatccagggatcggaggattggcggatccgggacagaaggcgaggcctggaggatggggaggggcagccatgtgagcctcagggaggacccagaaccaaccaccccacttccaacactgattcacctccagggcctctgcttgtggccaggatcttccccctccagcatatggtagcctctgaaaagcaggtggggctgggagaggagcatcccgcttagtttcacccttccagagacacaggaaggcatggaggccaaacacctgtctctgacagggtccccatgccacagcccagccctccagtccagggtagcccatgtccccctcagcccagggcggcccatacctgcctcatcatgtcaggacctgcagctcctgcctcccacctggcagtgatgtcatcctcatcatcccaaccccactacacgttggagaagccatttatcttcaggtagtgagtggggtgcagggcaaacacccctccaaggcacaagctaacggcttaattgctgttgtttccccatgttctggcttgcagcacttgtaacctctgggctcctgcagcccttaacatctgatacctttacattaagatttatcatccttatctctggaccaggctgaatacacctgtgtcccggtgcatctggccagcgggtcaaagggcctagcacacagattaacaaatgaatgagttccagttaccaaagttcaatccttgaggtggacagaagacgcccaaggcgtgtctcccatcacccttcactctcaatcctccttatcaagggcctcacgggaatagtgataagatctcagaatatacaggagggagcagtttcgggaaggggggcattggaaggaagtggagggcttggatctggggagcaagcggggagagtgctccgttccttggttttgggatcttgccttacgggtctcacctgccctccatcctggcttccacctggcagggtgtgtttgtgtcagaaagacgattgtgcgtaactgttcaccgcgtccacgtcccgagagttgcgcacgcgtggagatctgcaaaacgctccctttcagctccgcgcatgcacagagaccccaccccgcaagtccttgcccttcggcctgggcaggcgtccactcccatggctgcagggcgcgccgaagagcccactctgcatccccgagacgcggcccaatcctaggaatgtgcttagcgcaggtgctatcttcccttttcacattcccaatctctttctccgccccctcaaactcttgccatactcccacaacagcagaaaatctgaaaaaaaagtccatcccatctttgcactgacagcagtgcacagcagctggcagagaattctggcacggctattgtgcttgcgcaggcgcagacgggaagcgggccggaccggcctagtacactctgggaggcgtgcgcagaatgcgcagcgctgccgcgaggatctctgggaactgtaggcccagtttgtccgagagccgcaagtgtttcgggacgacgcaacgcaggggcacctgggagtcgtaggcggatgggcccaaagccttccgggagtcgtagtccttccgcccgctcctcgtttctttggaggttggcccttccagctccagttctgcccaggtgagcgcccatcccgcggccggccggtcctggccctttgtcgcgatgacgtggcggagttgagggtctctgtatttctctcccccgcgttctggtaggcgtccctggaaagatggcacccttttccgtgatctctcaatccctctctccgggtgggagtgctctaagcagctgttgtacctgctgacccgctttggattctgcggcccagcctgacaccttctcactctcgcccttcaacctgggtgcagtgcgagtgcaccctcctctgtcctggttacaacacagagtggtcagggctggcccagggggtgctcaggaggctgtgggaacacagaggaggtgctagacccagcccagggttcaggaaagaccttacagagcaaaggacctcaaatctaccacatccaaacgaaatcccagattccctgtcctaaacctgctcctctcacaatctttctgcctcctccccactaactgtccatccaagtgctcaagccaaaatcttggaatggtcgccagtgttctgtttctctcatccgcttccctcccgcaaccaaatcttgtgtgagtctcatcgtctctatctccagaagaggcccagaatctaaccacttctctccacttccactgtctccattctgctccgagctaccgttactcctcacctgcatcactgcaggggcctcctcactgttctgtttcttcccttgccacactccaccctctattcaggcacagtgccaggaagcctgtggaaatataaatcagatcctgtcaccagtcactaccctgccccccagcttaaaatcatccagtggttcccatctcagaataaaatccaagctccttatcctgccaacctctaagcttctggtcctttctggtcgtcctcagtcacaacacactttccaatgggctgaacacagccaggccctgcccttcatgtcctttgcatttgctattaactcaatttggagcattcttcccaccctgacccaatatctgtctactcattttgttggcctcagctcaaaggcctccagccaccctaaagaaccccctccctgttcccccccccccagtcataccaccaaagataattccctcgtatttggaaagcatcttagtcatttacttccttatccatggcctggttcctccattagaacatcagtgccctgacagctgcaacctttcctatcttgctcactgctgtgtcccagtacctagagcatgctgggtacataggcggcactcagtgggtatttgttaaatgaatgaatgaaagtttgagctgagacttgaaggtaagagttaggtctaccacagtgtttagggaagtgtcttgcgcaatgagatcagcctggccaaagatgcaaggggttgaaaaaccaatgggaagttcatctggctgaggtgagtaggtaactaaaacagggatgcaactggatctgataaggacctcaggaagtgaaccccagtactaggtgactgcagattcagaggttgaaaaagctgagttgtcttccatagagaagctgggtgaaaggtggtgttgcttccgggagacggggagcttggttaggtaagtttctgccttggggtgtgagagctggtcagttgggcactgagatatgagaggcctagatgggatcttccgtggggcatttggagggccaggctggtggacattgcgattcagagtcacccacaaacagaatgagaagaggggtgatgggcaggatatgaggactgtgaagaggcctccccagaagatattaagcaggaggcaaaaaacaagaacaaagagggaggactaaatcaaaagctgtgggagaaagtatttcaaaggggactttgctccgctgtgacagatgtacctgacatcaccgcagttgagtcctgagggctgcttgatggctcagtgacagggaagagtgctttgggcaaagagaagagccagtgaaaacaactagagacaagagtgttcctgggggtactcaagagtagacaccagtaagcaagaaggagagtggaaggagatgaggacagagaaacaaggagccagagcctgtagggcctcgtcggccattagcagttacattttgttttttgtttttttgagacagagtctcgctctgtcacccaggctggagtgcaatggcacgatctcggctcactgcaacctccgcctcccaggttcaagcaattctctgcctcagcctcccaagtagctgggattacaggtgcccaccaccatgcccagctaatttttttgtatttttagtagagacagggtttcaccatcttggccagactggtcttgaactcctgaccttgtgatccacccgcttcggcttcccaaagtcctgggattacaggcgtgagccactgtgcccagccagtagttactaaagtgagatgagatgcagggcaggatcccactggctgttatatgaaggagtgtgtgtggaggaggcaaggcagggagcatggagacctgtgaggagccccctgcagccatctaggagagaggcagacctgactagggtgctgccatggagatggtcagaagtgtttggctgttttgaagctatagtcaaacaatatgtgtgacttttcatttgagcacctggagtttgaaagggtccggacttagcattgcaatttggctccacccactgggagagtgacaactgtagtgatagaaagagcagtccagggtcctggaccccaaagcttctggcctgagcagctggaagggatggagctgccctgtactccaggagaagcccgttaggttagaggaatcaggaatttgggttttgagatgcttattagacatctgagtggcactggtctttacttgcatgtaagttagagacggtaaatacacagtcatatgaaataattccacacattgtggtaaatcctagaagcagcgtgacctgctctgaatggcaaggatgtgacggcagtagtgcaggctggaggtggtggtggcttgaggagggggactaagcctggggagtttttatgggttcaccagacaagtgggacgaaggaggttcgatgggacagttagagtcttggctgggtggggagggatgaggtaggaaagagaacagttgggggccaaggatgagccaaccccatcactgacccctcccctcccaacctctctgtgtctttcgggggccacagaagcttaggtggattctgataccagagcggggttaagttcagaactggaggcctacacaccctcacctcaaaaataggtgcaacccctgctagtctccctagaggttgatctagcctgcctgtgtatgtccttgtaagacacaatcaggacccattcctggagacagaatgcccaccccgacccctgaaagtgaaatccaattggtcttttctgtatagcccccttcccttgaacagagcatgacctccctctgtccttaagagtctctgacccctcccctcccaatctctctgaatagtcagtaatatctaccttctgatcagggctgtaacatgggtggcctcctggaagttgttacaactggtccttaatagacgccctcacccctttggacaggacacgatctaattctgggtataacctgcttgttgctccctctttttccccctgaaatcagcttaagttccttctcttcttggtgcataatgggtgcagtccaggaagccttcctggaggcagtggccttcttacaccagaacccatttataacccacgtatataagagcagcagccacagctgcccctggtctattccaggcaggggcactatctagggaactcctcaaaggcaatgaaacatgtgtaacccgcctcctctcccggtctaggagaagctgtcccttcttgcaatgcccgccccgtcatgtgcctcctgccacgtggcatgcgcctccctccgccgtccatgctcgggccaagtgctgtgcggttcctgcttctgcaccgccttcgaggcggaggtgcagcacatggtgcttgtgggctacctgctgccgccaggcgcagtggtggccctgggcacctcgggcggcaaggattccacggtgctggcacacgtgctgcgcacgctggcaccgggcctgggcatcttactgcagctcatggctgtagacaagggcatcgggcgtggcttagcgggaggatcccagtaaggagctggggaaatacgcatgtgcctatttagggccggagcctactgaaggctcatgtgggtagtacgtgtggctccctacgatggagtaaggcaggtttttcaagcctctgggtctctgacatcatcttagtgagagatgaagctggctgggcttctgggtcaggtgggcacttggagaacttttccgtccagctaaaagattgtaaacacaccaatcagtgctctgtgtctagctaaaggtttgtaaacgcaccaatcagcactctataaaaccagaccaatcagcactctgtaaaaccagaccaataagcactctgtaaaatggaccaatcagcgctctgtaaaatgaaccaatcagtgctctgtaaaatggaccaatcagcagaatgtgggtggggccaaataagggaataaaagctagccaccgagcctgcagcggcaactcatttgggtcccctcccacgctgtgggagatttgtgcttttgctcttcacaataaatcttgctgcagctcgctctttgggtccgcactacctttatgagctgtaacactgcgaaggtctgcggtttcactcctgaagtcagcgagaccaagaacccaggggaaggaaccaattctggacacattggtacacacattggcaggtagaggggctaccttgtaggagctaaggctggaatactctgctatcattattattattattattattattttgagatggagtctcactatgtcacctaggatggagcgcagtggtgcagtctaggctcactgcaacctccgtgtgccaggttaaaacgattctcctacctcagtctcctgagtagctgggcttacaggtgcctgccaccacacctgggtaatttttctatttttagtagagggaaatgactttgtatctcccttcacaaagagagatgtgaagaggtgtctctcatcgaaagtcacacagtctgaaatgctactgtgtctcttaactccttttctttataggtttctctctgacaactcttattttctctcaatgattacttcaataagtaatcatcgtccattgactaaataccagatacaagctgtgtagcctagagcaaattacttaacctccgtttcatcttttgtaaaatggggatgttaataatatctgggtccttgagttgggaattagatgagttatatataaagcactcagactagaggctgaaaaacagtaaacatgatgtaaatgtttgctgttatgatgatccacaagagcacaagacagtctctgctcctgcctgattctcacgaatgtaattataacctgacgagtgctactacggaaaattacacagaatgtgtgaatttatatcagggggtactagtggcggggaaaaggtggggattaaggaaacgtttcctgagtgaactgagacccgaaggctcagtgaataaccaggtgaaggatgagttggagtttgggcggggggtgttctgagctgaggtcacagagaggcaaaggccttgaggaggggaaatatgaccaacttgagaagcccgaagaagaacagcattttaatatacagactcaagtataagatgacaaaatgcagaataaacgtagtttccatttaaattgtatggcgactggtgtgtatgtattcattaactttctttctggtctttgtaaatcgcgtgatctgcattcccagagacacttgtgtctacagctctcttgagaatccccattagatggcccttttttctcctgtgtagtctgaaatacagttttaactgaggctgaaatggtgtttgcagcttaaagcacttttacccgctatgtggaaagagagctagcgaagggcttggtatacagtaggtggatggcaaatgagggctccccccaaggagcttgtttgtgttcccttcaggttttctgtccacctccagtctccttctggttgctccatggtgcccgggagtctccatggtccggtttccccatcagtatctgttccccctccccctgcccctctctgtcttgggtcctggcggccccgctgtgccctgggtctcccttccccgtctctctctgggtcctggttacccacagtgtcccaggggtctccatggctctgtctccccctctctgtctctggatcctggctgttgcacattgttcggaggtctccatggctcgctctccccgtcgccgtctctctctctgggacctggcggccccactgtgccctgggtctccgtgggtctcccctcccagtctctctctgggtcctggtggacccttggttcctcgaggggctccctggccagcagcgccctccgcgccgcacctcaccctctcccgtctctccccaccaggtcacaacgccgacgacatggtggacaccgtgctcatgaacttcctgcggggcggctggcccggggcgggggcctgggctctccgggctaggggggtgcccttccgcgctgccgcccgctgcagttcgcctcgcaggaggtggtgccgtacgggcacttccgccgcctcgactacttctcagaagagaggagcgcccgggacctgctcaagcgcctggaggcgccgcggccgtcggcggtgctggacctggtgcactcggccgaacgcctggcgctggcctcggccgcgcggcccccgcgccccggcgcctgcccccgctgtggggcgctggccagccgcgcgctctgccaggcctgctccctcctggacggcctgaaccgcggtcggccccgcctggccatcggcaagggccgccgggggctggacgaggaggcgacgccggggacgcccggggatccggcccgggcccccacttccgagaccgtccccaccttctagcgactccgggcctcccgccgggatccgacgcgcccgggtgaggtctgcctgtaaatgacactgtgaataaacccgttaccttacctggccttccatgtgaggtgggagggggatgggggcccagtgacctgaaaccctgaagctgggaccccagacttcggggtctcagggaggaagggtctcgagctggccttctggctctgagggaggagggggctggggggccatcctaggtctgagagaggagaggaccaggactagggctagaggaagtggggctggggaccccaggcatctgtggctgaggaaggagggcctggggtcgtggactcctggatctcagggaggagggggctgaacaccttgtgattcctgagcgagtgggggttggttggggacctcctgcccagttctctgctggttctgggtgcgctcagcatggtcctgaccctccttgagcaccagattcctgatgtttcctgtttgcccgcagtggggtaagcggagtgacgtgacttgatggacacacgccattcacagcccccgtcacgatgcctcccttccagcgcttcgtgtgcagcgcgtgctgcaccctcatttcgtctcctccacggcctcactggcagtagcctgagccgcagtaactgacctgggggctcccaccaggttggcctggctccagagctgtcagagattttgggattgcctttcccccatgctatcctgtcctcatccatcaccacctgaatctcccttgccgtctcttgtcataggtaaggaggggctggtgggctttgcagacctctcaagctctgaaggcagagctgcgcgagcctgaatcgccgcttaactcttctgaccttctatttcctcctctgaaaatagaagcaaccctccctctccactcccccgacatcagggtactcttgggaggattcagtaacttggttgttcatattaaggtttggccaccagggagcttttagtttcaggattgctgctcagctggtcctgaaaggagtgaggcccagaaacttcctgcctaacctgtgggagatttggtgttctcagtcccacctccgagctttgctggcttgcctccctagtcaggaatgccttccctttcccatctgcctgctcaaaccctccagggtccttacagaaagaggaccttcctgattctcccctcccacccagtccagggcgtagggatctcccaaaccccaccccataggtcccccacccataggtcctgtcctgactctgtggccttcccaccgttttgggttatgctctccctaattagactgatcattaagggcaaagaccagacctctctccccatcggacaataacagcattattcatccaagaaacacttattgagcacctaatgtgtgcaggggctgttctaggcactggtgagagaaaaaagacagagtctttcatggaacttagggccttgtgggaaagacacctatataatgtcagataattagtgctgtagataagaaataacataaagggaaaaggtgtaaagagctgttattttagtttgaaaggccagggcctctttgagaaggtgactttggggcagagatcaaacaaagcaagcgaggtttctagccatgatagagaagctaatgtcagaacaacacttccacactaagactgagaccaaatggaaaaacagtacacacatacacacacaaaaacaatctgatgacattggagagctaccaagttggccaggatcgcagagaaaagggaagctcattctcctggaggggccaaaaggctaaggaagcaagcagaaagcagaggataagaagatgggaacctgagttgagctttcagcagtgttatggctggggctggagacagaaatcatggtggccaggtgcagtggctcatgcctataatcccagcactttggggtgccaacgtgagaggatctcttgagctcaggagtttgaggccagcctgggcaacatacagagaccctgtctctacaaaaaaaaaaattaataaaattaaataaatacaaatagatcatggagcctggtgctaccaaggtagacaggacttgagggaccaaaaccctggaaggaagggaagatcactgaggtgagcccaacatgtttaaactctcctctcagcagtctgatggaactgggtaagccaaatttgatgttccgggtctgataaggagaggcccagtaaacaccccaaaccttccattagaactcaagaagggttacagattaaaagtaagggtcggccgggcgcagtggctcacacctgtaatcccagcactttgggaggccaaggtgggcggatcacgcggtcaggagatcgagaccatcctggctaacacggtgaaaccctgtctctactaaaaatacaaaaaattagccgggcgtggtggcgggcgcctgtagtcctagctactcaggaggctgaggcaggagaatggcgtgaactcaggaggtggagcttgcagtgagctgagatcgcgccactgcactccagcctgggaaacagagtgagactccgtcccccccgccaaaaaatatgggtcaactgggagtagacctgcccacaaaaagaccaaaacccatcttcaaactcactcagcctggggctggcttaagggatctgtccctattccacttgccagaaagcaaaaatagggtagccctagccacatgagccgatttatctttaaattaattaaaataaaattaaggattaagtcctcagtcaccctaaacacctttcaagtgctccttaccaccatattgaacaatgcagacacaatgcctccatcgtcatgaaagttccatcgcacagtgctgttctagactgtactagaatccagaggaggaaaatttcagtcagagctcaaaaaaatctctgcagtttttcaaacaaaatactagaaattcaactaaaaattaaaaagttgacaagcatgccaggagatatgacaaaattgttgaataccaagaggctgggcatcaagcacagatgtatttacaggtgttctagatatgagttttaggtatggactttaattgtcatcacgtaaaaacagatgctaaaatggagagtttcaccattgtattggattacatttttaaaagaaccattaaaattgtgaatgtgattaataataataaccaggcagaatggagtaactagtaccagacttaccctcctgctgtaaacaactataaaatagcataatgtattaggcagttttccctgctttgctccacatgcaggccatcttcccaattgccagccctggggatgaccaacaccagcctcaaatctaccaccacctgcttggctgtgtgcttacagaggtagtagctacgcaggcaacagttttccatagaactttctgagatccccctttgggggtcccatggtaacaatgggcatacttggcttttcatatatccctgcacgctctgtcttgcctacccacacctgttcttcaatggaactgcttaatgatgctctcatgatcatcctgccttctccaaagcatcactttccagctctaccacatttgcattaagttctaggtcctctagtgagcgctctattctcataaaactcttggctgctgtttccctggccacactcttgtctggtggagtgatgaaaacctatggagataattttaagctctgggtcacattatccttcttcagggcatatttactgttgcttgtggcaagccgaccacttcaatttgatcagatattgaggaaatttggtctggctttaatccttatgaggtatcatctagttccaactcatccttactctacaaggtcccaaccacagcactacagtgtttaccatggccctttttccttggcaagccctcagccataacttttatcattctatccccatgagattcaaatgttctacttagcttttcagtctatgcttggaatcagcaacctgtttcatccaaaggattgggttgtggaagacatgaaggaccctgagctgaaagcagaggacccagctcggggctgatccacaggccactcctggtaccataccctcctctgttccccaggtcctccctctccctgcaagtgctgacccagacacctgacattcacatcctaggtatcctggaatctgggtgcaatggggctctgacttccccatgtcagagcctgctgaggatataggacacccaagaactgttactgggaatgggtcaccctgagacacacctccctccacccccacacacacttattgtggttgtgatgatcagaagagcttgcaccttgcacttttctcactccaggatccccagatggacccagatccagttcgtggctattggttctggaagggggccatcctcacctggatcctccagtaccaaacataacagagtctaaaatgtgaaagaagaaggcaatggcaaatctaccttctctgaggcctccaaactcgcaactggccctcaaggatgagaggtgctcagatatgggacacgggaacacctaagctctctgtaagtagagtagtactctacctttcacatttagaggttatgttttctatttgtgacaatatctcactaaaagtcttctcctcatgagggaaaaatgtcatgctcccctccttcttggcatctctgttgctcagtgaaggtccccaaggaggtggaatcagcctacggttcttggtgtctcttctgcagcttttgacctggtctatttgtggaaataggaggatcatggaaatggaaatgttgacctcttccacaaaccaaaagacataggctcttctagagtaaacacaaaaatttcaagatgagagatcaaagcatgagaatacagaggcagtttgtcctgtaccacatcttcaaatctcagacctgcagcttctatcctgcatatttctccaagctgtaccccaaaatgatgacgaaggaccttctgtgaagtcacatttcctgcaatcctcttgtccctgcacctgcacagcaggggcaacagcagcatcttgggtttggaggggggtgagtctgggactcctgacatcgcctgatgagtctcttctacctggagatcaaggcagctacagaaagagcacagctagagacttttcctggattgagctgctccaagttcctctctctgttaggagtcctcttccctcaaacaactaccagggaagtgaaagctgacctccttttaccccaggcctactgataacctgttcagtgccccctgccatctcattcctcactcagatgttgcctcctccaggcatccattcctacctctcctcagaaaatgaatggggcatgccccacctcttctctgttcacttggaactcggagatctctctcagagcagaagagtgtaggagccctgaaactgaatcttctgcccctccacccatcacacaagaagtcacgagaaggtggaactgaaactcacctgcaaggggggcccttcatggtcagagacggtgactcagaactgaggccctggctccagcttcacactcgactgtgatgtttgtggtttttctggtgtcaatttgagttcagaaagtcactgaatttttgtatgtctcctcgcttattctcaggtttctgataagcccttcactcacaccttcagtgtgagttttgacttcttgacagttcctccagccctatgggcctcccatcttcacagtatttatcagatctctccctccttaacgcacatccattttaccctgacattgccttgcctgttctgcccttcatgacaactctctccatcctgtggtccactgaggccccaggatccttttcctagtctaaacacttactattcatgtagaatgaaggaaaacttagaatttatttctgtgacccctcagctccaaatataacttcacaaccagccttctaatagatccttcattccttcatttgagctgattcaggatttggcacagagtcaggtatggaaaaggatcacatatcatgttctgtttttcagaacaccatgacaggacaaataagggattcaaagcaagagcaaattatcaactcactggaaaaggaagggaggaagagatggagcctaccacatagaaggtttcctggaaggagtgagggcagagtcagcccagagaggcaaggatcccagtggcctgtgagaaatgcaccatctctctgaagttaagtcttctcttccctaaaatgagggggacttcagaagaagactgaggaggagtttgaatgtcctctgaccagcacctctgtcctgcagcacagaatgtaaccaactctgctttccaaccttcttacctctgcatttgagacaggacagagttctgctcccagggggcgctccacccgccatgcccgatttggggaacaactagcccagggttggcgctgtccatggttctgcaccacaactgtgctctgagttcaggaaactcccaactctgccatggacacgaatttacaagcacacggttctgagctgtaggccagcggggcacctaagtcagagaggcttcgaaaaggctgggtcccttttgggaaggagaggccagggaaagagacttatcgctgtgcttttcctctcactcctcttgttgagctaaggatcattcttttgaattgtagtaccggcctggctaagggacagggaagaacaaggtatttttctgaagttccagattatgctgatgttgctggctcttggaccacgctttaagtagcaagtccgtgcctggatctcctctcggataagggtttaggaaagagatggacattcactgaagctccccaagttccagactcagggctgtgcttttctatatatgcctcatttaatcttcataaccaacctaagagaggtttggttaataattctcatttgacagagtgggaaacagagactggatgtatacgcgatttcatggggtctcacattattggtgcatatatatatgtgtgtgtgtgtgtgtgtgtgtgtgtgtgtatattttttttctttttttttttttttgagacaaagtctcactctgtcacccatgctggactgcagtgtcatgatctcagctcactgcagtctcaacctccagggcacaagtgatcctcccatctcagcctcctgagtagctgggaccacaggcacctgccaccatgcccaactcatttttgtttattttttgtagagatgggttcttactatgttgcccaggctcttcttgaactcctgggctcaagcgatcatcccatctcagccttccaagtagctaggaccacaggtgtgtgcttccatgcccactaacttttttttctttttgtagagacagggtctcactacattgccagactcgttccaaacacctgggctcaagtgatcctcctgcctcactctcccaaagtgctgggattacaggcatgagccactgagcctggtgatattttccactgtgatgttgtcaaatctatcaagatttttggtaagaaggatgagtttttattaactttttgtcataatctccttaaagaaaattattttttcttcaaaaaatttaagaaaagatgactatcagaagatcagacatttcctagcttgcaatatttttccatgtttgtgttatcagaaatatacttaccattcacattgtgtgatcatctgttatgctgagaaatagaacatgcgggcaccccaggaatcttagaacccctctttgtttcccaccctccctgaccttcttatgagtaccaccttgctgatatttgggattatccttttccctgcctttgcccataagcataatacctgtgtatatatttttaagcaagaataattgctttaaacattcacacaaatggaacaatgtggtaatgtgtattttgtatggccaaataggactgcactagctttccttttattaatgtcggcataatatactttcacttttggccttctctatccttgtactttacgtgtatatgttgtaaagatcatatacttggaatccatccaagtggactctgttttaaactgaagcatttatccaattatatttaacataaatatcccatgttatattttgttttctgtatgtgtcaccaattctacattactttatttctccgttttgtttgtttgttttgtttactaagtaattttgttgttgtttggctttttgtttgttttttgagacaaggtctcactctatcactcggcttactgcagtctccaccttccgggctcaggtgatcctcctgtctcggcctcccaagtagctgggactacaggcatatgctaccatgcctggctaaattttttgtacttttttgtagaggtgtgttttgccatgttgcctaggctattcttgaactcctgggctcaagtgattctccacccctcggcctctcgaagtgctaggattacaggtgtgagccactgcgcctggctggtttactaagtttttaatagtatacctttagtgatcactaggttgaaagttatatattatgattctgttcttttagccgtcatgagaaaaatttacagcatgccttattaacctatcaaagtctttagtaaatgaaaacctctctctcctcctggataatatatggatattgggacatgtaaaatacacttaccttggtacttaactattgtgattgtcaggaattctaaactatcttttgtttttattaaagctcccccatttacttgctctgaaagatcattattgctttctcatttttgagttgactttactgagtatagattgcaaattgatgttagaaatagtatttgccttcttctactctccaggttgctactgataattcagttgtcaattaaatgacttttcttttgaaggtgatcctttttctctggtagctgttcagatttttttccttgtcttcagttttgattcagccttaccttgacacaaacccaatgtagggatggtctcttttgacatttgcaacctttcgctgggccacagacttaaccttcatttccagagccacatgcaagaccaaagaaccaaagcttcctttttcaatatgagcaaatgcccctgggaattttggcttagtgattctgcttacttctctgggttcagcctttccccagaattttggcctaagtttccattttcttttcaggcattctatactatttaagggaaggattctttttctactcattttttccccaaaagattttattattttcaacacaaggcttgatcaaaattatctaacctgtcataaccaaaacagtagtcacaattcaccttctttacagtgatgaaaatgaagtttgggtggtagatattgagaatcaatgtcctcccagtactccactggaattatccactcatttcctcatgaccacttgctgaagtttctaacattgtcatttatctgggtttggagataccctagataagtaactggagaatttttagctgcttttggtttagcattttaaaaaataaattagttcaattttagaggagggagagtataagttctttcttcagtccactcttccaactcaagaccacccattaactcatgtttggaggaaaagatagtgtaagccagatgaaagcaaggaggcatggcttccaggaggaggaatctcaaattgcaaagacagtgtggtatgaaccagcatgaaaggcttaaggaagggttaggcaagaggaaagtataaatgaatagatagcagggagatcatgaaggactttatgtgtcaggggagatgcttgtgatatattgtctaaggccagggggccgtgaatgggtttgggcaggaaagagttagactcaactctttggctgttggaaggattcctatgggtctcataaatgaaggactggagccaaaggaatatgatgcaaggattgcaggtaaaagtgggcaaagatatgactctggcaaggatataagatcccacatcatgaaccaagtgccaggctgaggggctggtctttcctagggagtcttcgaagagttttgggaaggggagtgacaccaacatattgctgccctgttttttgtgcctggtcatccccagccttgagagaacttgccagcaggacctttctattcaaggaagagagaccagaaagcactgagcacaacgccctgttccaggacccatgttggttgatttccatgtgttgatttctttaatgttcacaacaacctttgaggtagcatgcatgatctctgatttacagaatgggaaactgaggcacagagggatgcagtgaattgcttgatgacagtgccagggcctagatttgagcccacctctctaattccatctgcttggagcacttaaacatcagttaatgttaacattgccacaagggctcttcgtgcttcagcaagtggtccctgacttgtcctttcccccagacaggctgtggctcctccagccaggactgaactctgggcaaatcctcacttgcttgtcttgatctccgagtactccgtggtgcttggggcctcctggtccttaggctccctcgacttcatctcagaaaaactaagggaggcataatggagctccttttgttcttccaagggaggggcatccccaggaggagatgcttgatctccggggctgtctggccagggcttcttcctggaaccctgagtaaaggggaaggaaaggtgtcacagtaggaataaagaggcaggtgtagaataatgagttcttatatttatatgttgccttgggatttattttgaatgtaagttggactttctcatgccagaagcagggcttagtcacctggacacaatttccaattctctacctcctcccagttccccaaggtggttaatccaaatgtctgccttatacaaccatctccttgtgaccagctccctatgggacatacagctacaacctacttgacttacgtattgactcctgtgtccctcataggctgcgcagatatactgcagcaaccacctctcagtcacagtgtggctccacagaactcctgcctgctagctctaaacccccagttagaactccctgtgggaagcctgcttagattatgccctggactctaattaaggctttggctcatgggttcttctctctctctctctctctcttgccccctacccactggatgagcacttgcgtcctggtcagttccctcctttccattcgcccttccaggcttgctgtgctatcttctctctgggacctgtgagtaataaactgcttctgttatttcatgtgttttgttgtgctgtctcctctgtgtcccacccgcccaacagacctgaacctcacttcttttctggtcaaggctctcctagagaatagctgtcttggtgggaataaaccggacacaggtcataggaaagctgcaagggaatctgccaggataaacaagtttgctgtgagagggggtcacaggctgggcactcaggcagcaggtggtgtgccaggataaaggagtattctgtgaaagtcacactgtgaacatgatggccagatctctggggttcccattcaaggccgggctagattttatgaccactccccaaagagagacctcaacaccaaataagagaaaaatacaacaaatggttcccacagggaagttgggctgatgtgacatttatcaattcatccttttataatccactcctcctaaggacaggccataggctgcctaggtcagggtctatgtctgatttctcacactgtacgtgcccaggaaccggcacagggcagacagggctgggttcaaatcccggccccacctgtccatatacatttcctgtgaactcaactattcgctcattctttcaaaattttgtaatactatgattgatcagaccatattgaggacttactaatcacattgaatcatcaccaaaaaaaaacccacaacagtataaaagatattctaattatccccaccttacacacagggaaactgaggtggagagaggttaagtagcttgcccagggttattcatctaatacatggcgaggccaggattcgaactcagccctgtctcccctgtttcaggttctgggcacgtacagtgtgagaaatcagacatagaccctgacctaggcaggaggagcggattattgatgaagcaaatgtataccttcggcataggttacaaggtgtcttatgtgcaaaccagaaaagagatggcaattctgatcctggacccagtttccatgaaagagaaacaaaatggagcagatcctgtccccagcaaagatggtaaccagatacaagtaagcaatttctttcctctcccaccttcacccatatccctacccatcacgctatggaaaatatgttgaaagcaacgtgagtcttcaaacagtagctcagaagttttctttttgagacagagtttcactctgtcatccaggctggagggcagtggtgtgatttcgtctcactgcaacctcccgtccctggctcaagcaatcctcccacctcagcttcctgagtagctgagaccacaggcacaagccaccatgcccagctaatttttgtaaagacagggtttcgccacgttacccaggttggtctcaaactcctgggctaagcgactggcccagcttagccttccagagtggtgggattacaggtgtgagccaccacacctggccatacagtttttttaaaaggactccgcagttagggaaaaatggcttcattgtgtcagaaaaaaatagactttctggagagagctgcttatattaggcacaagaaagatgaaataaaatgaaaaagtggctatgcacaccagcattatgcaggcaaaggaagaaataaagacatatgtctatcaataggtgtgcggtatatgaaataaaaagggtgaaattgacaactgaaagaaaaggcacagctcagattagtaaataggacaatgcagtatgttcaccctttcactcaatagctctttgctgagtgctttctttgggctagatgccgttcgtataaatgaggacataaagcagactgaaaccacccaaatacctccccgtcatgcagttccttgttagacagaaggaaaagtaatactgggtaacagttataagtgagctccctgtgagcttgccactttactaagcactccttgtaacaatccgagacagatactagcatattaataacccaatttctataggagaaaacaaaaaaacagagaggttcattagcttatccaaggtcacacagcttgcaagtgggtgaatctagaacctgaatgcaggacgtcaaactccagggaccatgctgtgcctcgctttaccattctgcctatggcatgaaagtgtgcagaatggttaaaggtaaaataaaggagaaaacaaagctctctctaccatagttcttgtcaaaagagtgaattcatacaccggctctgttctccaagacctaccaatgatggaactaaagatggagctcctgggtgaacaaaactttacaaatcaatttatgatcaatcaatcacactgatatccctaggggaaagttaaggctcatttgaagaaaaggggtgggagaactgggcggggggacagctggcttgttgagaggatgggttagcccaaacatacttgaattctgctcctttctctcctctacccttccagtgggacaaacattgtctgcccctcactgcagaattcagagtatggacaggattatgatgtgccagtgtccaacaggcatgtgttgggtaagcaccagaggcccactggggtgaggagaaggagaacggaggtggaagctcactggtctttgacattctccttgccattttctccactccaaactcccagggctggtggatcacaatgcaacgagagtccttgaccaatgttgcttctccacgagggtctgaagatggagggatgacttaagctgccttactggggtgataggaagtgggactggttgggtgtggtttgggttcttgaggggatccaccctggggcttgtcccagtcatttctctttttttgagacgatgcttcactgttgttgcccaggctggagtgcaatggcatgatctcggctcactgcaacctccacctcccaggttcaagagattcccctgcctcagcctcccgagtagctgggattacaggcatgtgccaccacacctggctaattttgtatttttagtagagacggagtttctccatgttggttgggctggcctcaaactcccgacctcaggtgatctgcccacctcggcctcccaaagtgctgggattataggcgtgagccaccgtgcccggcgtccctgtcatttctttggctcagtaagcctgacacaggccagcatctgcccttccctcattcaagaaacactgccagagtagccaataaccccaggggaatgtgagctcacagctcagaaggctgggcacctttgaagaaaagcaaaccaacagaacctgatagaccactagaagcacaagtactaggacgctttggtcaagaagctaaactgagcatattacatgcactaaaaagatgtggcaatattagcagcatgaaaacaagcataagaaactttgtcaataacaaagtgtgcatgcaaaatgaatgtgaaacataataaggaattatgtaattgtgtacttgatgcaaaaagggccatgtggaaatatctgaaaaatatcataggaagagcccaatggatgggatggagaatagaatgactataattgagggcaaattagtgagctagaagggccgtcagaagtatcccctaaaaggaagtagggaaggatgaagactagaacatatgagaaaaaggttaagatagatggaagatagaaatagaaaactggccaggcgtggtggctcatgcctgtaatcctagcactttggaaggccaaggcaggcagatcacttgaggtcaggagttcaagatcagcttggccgacatggcaaaatcctgtctctaaaaaaatacaaaaattagccaggcgtgatgatgtgcacctgtaatcccagctactcgggaggctgaggcacaagattcacttgaacccaggaggcagagattgcagtgagccgagattgtgccactgcactccagcctgggcaacagagtgagactgtcaaaaaaaaaaaacaaaaaaaaaaaacacttgaacatttagataataatagttttcaaataagataaaaaagaaataggccgggtgtggtggctcatgccagtactttgggaggccgaggctggcggatcacaaggtcaggagatcaagaccatcctggctaagacggtgaaaccccgtctctactaaaaatacaaaaaattagccgggcatggtggcgggcgcctgtagtcccaactactcggagggctgaggcaggagaatggcgtgaacccgggaggcggagcttgcagtgagaggagatcgcgccactgcactccagcctgggcgacagagcaagactccaccttaaaaaaaaaaaaaaagtagaaaaggaaaaatatttgaaaaaaatagtggaaacaaaatttccagagttaaagaagatgaaacacctcagctgaaagggccccacgagtgcaagaaaaaagatgcagggaatcccatgcctagacacaggacagtggatcttaagaatatcagaaccaaagagaaaattataaaagtttccagggaaaatgagtggattacctacaaatatgtgagattaagaatgacgtaagatgtcttaacagcaatactaaatgcaagaaacagtggggtggagtttaaagcaccaaaggaaaatcactttaattttagaatgtatatcctgccaaataaaattaaaatgtaaggggataaaatatatttccaggcatataagtcttcagaagccttgaggaacccaaactgaaaacccactggggggaagaattcaaataaaaagagagaaagagaaagaagaacagaaaatctgtgataagtatggaatagaaaggtgacaaaatacctcaacaaaatgtgtagctgtatattttttaaaaaatcaaataatagaaaaatgctaagtatgttcataataacacagaacaaaaactgcacatttgtagaaaatatcaacattgtaaagagttgaaggaagagaggccaagagatataaaagcgcaccaaaattctttttgttagatgtaagacagagatattaatttttttttgaggcgagagtcttgctatgttgctcatactagattcaaagtcctgggctcaagcgatgctcctacctcaccctcccaagtagctggaattacaggtatgcatcactgtgcccggcaagatattaagcttctaagtaagaaaggagaaaaatgaaatattgaaaaagtgggactaagtgaaagtaaaaggtaaaatagtagaaagaaatccacatatgtcagtaaccataataaataccagcagagtaaactcaacaagggatgtcaaattggattttttaaaacctggttatatactgtttacaaaaatcactggtagagcataaatacataaaatgttgggaggatgggagaaaatgaaaaagtatcaggcatctaactaatcaataagaaactagagtagctatattaagatccacatgccgcttcattccagcccgcatgagtgagtgagaccctgcctaaaaaaaaaaaaaaaaaaaaaaaaacatccagtcgaacagactttaaagcaaaaagcatcattatgagccgggcacagtggctcacacctgtaatcccagcactttgggaggacgaggtgggcagatcacttgagcccaggagttcaagaccagcccggtcaacatgataaaaccctgtctccactaaaaatacaaaaattacctgggcatggtggcgggcacctgtaatcccagctactcaggaggctgaagcaggagaattgcttgaacccaggaggtggaagttgcagtgagccgagatcgtgccactgcactgccgcctgggtgacagagtgagactctgtctccaaaaaaaaaaaaaaaaaaaaaaaagcaccactatgaagagaaagaattactatgtttgataaaatgttcagttcactgagaagatataatgcttttctaaaatatatggttttaatttaaaagtacatcaaatataagaaacacaattgttagaattacagtaagaaattgacaaatacattatcataatgtaagatttcaacacacctctctcaagtattgacatgttgggaagatctgttgacatctgaagatttggatttgaacattacaattaacacactggactgttaatttaagaaataaaaaatatacattgttgcccaggctggagtgcagtggcacgatcttggctcactgcaacctccacctcctgggttcatacgattctcctgcctcagcctcctgagtagctgggactacaggtgcctgccaccatccagcatgcccaggtaatttttatatttttagtagagacggggtttcaccatattggccaggctggtcttgaactcctgaccttgtgatctgcccacctcggcctcccaaagtgctgggattacaggtatgagccaccgcacccggctaaaaacatacattattcttaagcacacagggaaacatttacaaaaattcattgtatacaggccacagatcaagtctcaacaaattttaaaagtagatatcataaaaccatgtattctgaccaaaaagcatctacttagaatttaattatgaaagatgtttaaaatcttcatacctttggaatttttaatcccaaataatttaagattcaaagaagaaatcacaatgttgttttaacaatatccacaactgaatgttattcaaataatacatatcaaaatttgtgcaatgggatgaaaatgaaattctgagagaaatttatccctaactacgttttatagagaatgaaaatatagacactaagaagctaagtatccagcttaaaaatttatcaaagatcatcagaataaaccaaaacaagtagaaggaaggtgctgagaaaatgagagtaaaaatcaataaaacagaaaacaaagatacagtgagaaaattctacaatcccaaaagttggttccttgaaactgataataaaatagggaaagcaattaacaagatttagctagaaaaaaagaaagaagtcacaaataaccaatgtcaggaatatttctaaaaggggaagtaatctcgacaaaaacaaataatataaagacaaaagaatgccacccatatccttttgtcaaaatatatatatatatataacttaggtgaaaggaacacgtccctagaataaagctcgctgaagaatacataaaatgattaaattaggaaaattgcacatagtgacgccaccaggcccaggtagtttgataagtgacatctatcaatcattcaggaaacaagtcatttcagttttatacacactcttccagacagtagaaaaagagagactagtccccaatttctcaatcttatcttgatacccaaacagaagaaacaggaggaaaaaggaaaatgacaagtgtatttgaccatgcatatagacgcaaaagtgctgagcaaaagatgatcaaacaacctactggagtattaaaaaaatgctatgaataatatggttttctcccaggaatgcaggagtagtttcataccagaaaaatctttaattgtcattccccatggtaacagattaagtaggaaaaaatcctatcagtagatgcattcaaaaaatacaacagaagtttaggataaaaacttatttagtgatagaaaggaacttccttaacctgatgaaagttcacagaaccaagtggcaggatattgggtgcatttccttcaaaatcagcagtagcaaaagatgcccatggtcactatgtctactcaactttgaccataatctcacccagcatattgaaacaagaaaaaggaaagaagtgcttaggacaaagggaagaaataaactgttattattttgcagatgatataatcatctaatttgaaatcccaaaacattctaaataatacccaagatcaatgtgtgattttttttctttttgtagagatggagggctcactgtgttatcccctggccttgaactcctggcctcaagagatcctcctgcctcagcctcccaaagttctgggattacaggcatgagccaccaaacctggcctaatttgtgattttgttttaattgaaaaaaatttatttaaaatacttcaatttctatatactagttatttgaactaataagggagcttggcaagttggaaggaaatgaaatcaattaaaaatgagttttacttgctgcatttactgagagaattatgacaattctctaaatccagagagctgacatcccagaggagatgggtgtcactatgaagagatgcacagttatagtgaatcccctcaaggaacccagctgagaaattcaaccccatcaatataggaaagaaaaaggagaagttctgtgttgccaaatggtggggaaatgaaaggtaactggctattcttcaaaccatccatagtcacaaactgcccacagtctgaggtgttacacagacttccgttgccagatgaggttaggtttgcgtgtcctcacttcctcaaaaaaagtgattattcaggacagtgggtcatttgttgaaatctgacatctgttagaagagaaatacatctgcagagtatacatgaggacaggcatttcttgctcagtacctgaagcccaaaaggatgagttgattctttaagaaaatagcattacacttgcatcaaacccagctgctttgattcagcaagccatgacagttaaaaataggaatatcactaatttttcagatggtatctatatttctgaaaaagaagagatcagcaggcttataaataagatctaagaattctccagctaccaaagcaagaagatgctaaaggacacatgcaagaccaacttgtgattttttttaattacaaaaaaaaaccctcttatattttttaaatactttcattctgcattctgataaggaatcagaaaatgcacttttaaaaagatagcatttacaatagcaacaaaaactggtatttaggaagaaaaataacaaaagatgtgtaagacctgtgtgaagaaactctacattatctctttaaaacacttaaaaatatttaaaggaatagagagagaaagacctactgtcatggataagaaggcatgaatttctaaacaagtaaattttttccacattgagctatagattcaatgtattttttggaatttgacaacctgattcttttttgttttgttttgttttgcttttttgttttttgttttgttttgttttgagacggagtcgtgttctgtcacccaggctggagtgcactggcgcgatctccgctcactgcaagctctgcctcccaggttcacgccattctcctgcctcagcctcccgagtagctgggactacaggtgcccaccaccacgcctggctaattttttttttttttgtatttttagtaaagacggggtttcaccgtgtgagccaggatggtctcgatctcctgacctcgtgatccacccacctcggcctcccaaagtgctgggattacaggcgtgagccaccgcgcccggccttgacaacctgattctaacattaaagtgaaaaaaaaaaaggaccaagaatggtcaagatactattgaaggagattaaggaagaggttttgctgtactctatatcaggacttatttttgaatttatagacagtgatgactcagggacagtaaaattgactattggagtagaatagagaccacagaaagagaccgacaaatatatagaattttaatacatggcagaattggcatgttgctcaatggagaagggagaaggactattcagaaatgaaggagaaacatatatggatcaacactatacaccatacacaaaagtcaaccccagacagagtgagtacttaaatgtcaaaagaaaagcatactctctatgtccatcagttcaatttttttttattcttagatcccacaaatatgtgagaacatgcaatgtttgtctttctgtgcctgccttatttcacttaacataatgatctccagttccatccatgttgttgcaaatgactggatctcattcttttttatggctgaatagtactccattgtgtatatgcacaacattttctttatccattcatctattgatggacacttaggttgcttctggattgtttgcaactcaacggatcaatgcttgaggggctgggtacccaattcttcatgaagtgtttatttcacactgcatgcctctattgaaacagttcatgtaccccataaatatatacatctaatatgtacccacaaaattaaaaataaaagcataaaacttttagtagaaactatatttgaatatctttctaatcttaggatgggtgaaattttttttaatgagatccaaaaggtactcaatagaaaagagaggatttgtgaatatgattatattacaactaggaacttatgttcattgaagatcactttaagaagtgaagacaagctacgcattgggagaagatatttatatttacaacacatacaatgagaaaaatagtgtaaaaatgtataaagccctccaacaaattcattaagaaaaagtcaaacacccaataggaaaatgggatccagatgtgaccaggtgttttatagaagatgaaagcagagagagatttttcatcttcactggtaaccgaggaaatgcaaatcaataccatagtgagatagtaaaatagcctccaaaactgagaaaagcaagttggagagattacagaacaacaagatttcctaggcatagatgagagtataaatggatataattgctttggaaagccatttttcatgaccttgtaaagatgcccattcacatgcccagcgatgcggcaactcaatctttaggtgatgctaaaggaaagctcgtgtgtgttagtacggtgagacaaggataagaatgttcagaacggctcaaatggaaacaactcaagtgtgcatcaatatgagcttaggtgatagacacaatcataaaatataatattataagccgtcacacctataatcccagcactttgggaggtcaaggtgggtggatcaagaccagactggccaacatggtgaaaccccatcgctactaaaaatgcaaaaatgagccttgcgtggtggtacatgcctgtaatcccagctactcaggaagctgaggcaggagagttgcttgaacccgggaggtggaggttgcaatgagccgagatcgcaccactgcactccaacctgggcaatggagtcagaccctgtctcaaaaaatatatatattataagcaggaaaaatgaatacaactgcaactttatacaacatgaatgaatcataatacaatgttgagtctacaaagcaagtccaagaagtgtgcgtggaacatgataccctctgtagattcataaacaattaaaactaaatagtggcataagcctacatatatgtgacaacactaggaagacaagattcacaacagtggttactgggaatggatcagggagcaacacaggtggatacaagttatcaccaatgtgttaggtcttaggttggatggtgggtttgcagttatttatcatattatgaaccaaagtgaaaaagtaaaagtaaatgatgcttgttccagtcatgacagcttggtcatgaactaagcattttggacaattcgttcggggcaacactagatcaattttataaaagaggagaggagacacgctggacagaaacagcaggagagaaaactgcaggggctaaagaagccccagcccctgtccttcaagaattccacagatattggccgcacgcggtggctcacacctgtaatcccagcactttgggaggctgaggcaggcagatcacctgaggtcaggagttcgagaccaccctggccaacatggtgaaaccccgtctctactaaaaatacaaaaattagccaggtggtgcatgcctgtaatcccagctacttgggaggctgaggcaggagaattgcttgagcctgggaggcagaggttgcagtgagccgaggttgcgccagtgcactccagcctgggtgacagagcaggactccgtctccaaaaaaataaaaataaaaaagaattctacagatatgatgagtgggtggagacaggtaaaggcagtggtgatgtgtgatggggacggggatgcatgtagggctgtaaacacagaagagaaggggcagatatcaacaggaggggaaatgactagagtagcagatactgagattagagctggaaggattagatgaggtagtctggtggaaacagggaaggaaaggtggaagaaactatacttgcaagggctcaaagttgtaggacagcaggtccgtatggagacagaaggccagcgtggccaggccacggggcaggatcagaggacagaaacaggctgaagtggccacctggtgtggggcaaggaacatgggcctgattctctaagcaacaggaacaaacaacaacaacattgaaactccaggctgcctgggaagtaatagttttggggcgatgattctggcagcctgaagtttggaatgagagatggaggcagggaggaagtgaggcaggctctgtggtcagtagaggtggggagggaagatgagcaaaggacaagttagttttacttttagaaagaaggttggtggccgggcgcggtggcttacgcctgtaatcccagcactttgggaggccgaggcgggcggatcacctgaggtcaggagttcaagaactgcctgcctaacatggcaaaatcccgtctctactaaaaatacaaaaattagccgggcatggtggtgtgcgcctgtaatcccagctacttgggaggctgaggcaggagaatcgcttgaacctgggaggtggagtttgcagtgagccaagatcgcaccattgcactccagcctgggtaacaagagtgaaactccatctcaaaaacaaacaaacaaacaaacaaaacaaagaaggttgaatgggacataatgatttcctggctctgggatatgaagggggagaacaggagagaagagaactcccaggtgatgagggaggagtgggtttggtggaatgctgaagagctcagcctggactttccgagtggacatgcacatgagaagatccccaaaccactcaccgaggtgatggtacccataatggggtcttcatcatccattttctctggtctcccagctgcttgcttcctgcgggctttcactctaaggaaagaaaccagcacagtgcagctgggaccacccaggcacgggttagcgggttgtcccatcccatgctaagatggtgaaaatgacaatgaagccatccaggccccggaactaaactcggagaccttcctgacttcggagtgagggctccatcctcctggataaccagggatttggtcagggtggccatggactgaatttccatcatatagaccccctcttacacacaaaaccatggcaggaatggtcatagcagtgttatgcatcatagccaagaagcagaggcaacccaagtacccgtcaacagctgaacccacaaatcaaatgcgttccatttatataatggaatattatttgaaaacaaaaaggaatgaagtatcgatgcatgctacaacatagatgaatcttgaaaacattaggccgagtgaaagaagccagccacaaaggaccacatatcgcgtgattccattcacacaaagtacaactgcaacttcaggacagacaaatccacagagacatggaataggttagggctgggggaaagaagcaggagtgatagctaaggggtgcaaggtttctttatgtcttcgtttttcactttaggctgatgaaaatgttctaaaattgattttggtgacagatgcataactctgtcaatatacttaaagccattgactcgtacactttcagtggatgaattgtacaaaacatgtatctcaataaagctattagaaaagaaaaaaagaaagaagacctctctggatctactcagttctgctttttgttttgttttgtttttcttttaagacagggtctctcactctgaggcccaggatggagtgcattggcacaatcctggctcactgcagcctcaacctccatgatcaagtgatcctcctgcctcagactcctgagcatctggaaccacaagcacacatcaccacctctggccttagctctgtgtttctgagattcagtctctcctactccctacaaacaccaccctgtaccttccctgggaccaagacttacattaaaaagaagatgaggcacagacagatacagagcagggccatgacaccagcaccaccaagggctgcaggaaccactcctgtcccgaggttcgatctccctgcagaaaagaggggcgtgcaataactcactcccaggactcagactcttgtcctcccacctgctgggcaacttgctccagggccctgctcagacaggagatgaagaaccctgtctccccaccaccagtccagcctctctctcccaccatccatcactctgggatccatgcccctcccctcaggcccctgccctctgcaatacgccccctgaccttgcagcagcaggacagagccgctctgggacccatagatgttccaggccttgcagctgactttgaggtcggagctgagccccccgtggaggatcagggagctgttggcccagggcccagctgagctggagttgaccttgaatgagccctggctgctgttcccctccagcggcttctcctcaagccgccagcacagggagggggccggccgggctcgaaaggagcatctgcagtgcagaccctcagcctcccaggagcaggaggggcccagcaactgtgggagggctgtggggagggaggacagaactcagcagggggcctcttccttctttaataccatgcagttcctgctccagctgcccccacactcacagtaaactgagagattcagaaaaatttgcaggaagcccagcgggtgctgagcgcggcaggtgaagcctccttcttctgcagaccttactcgacgaagctccaagatcccggtattggagatgggggtggcgttcagggcaggggagccctggaaccagctcaggtgtgcaggggggttgctgggagcatcacagagcagccgcagagcctggccctccaggaccggaaggtatgaggtgttttgcaggatctctagggctttggggagagaagggtggggaaagagagatggggccagggaggctgacagtccctatccttccctccttcccaggatccagatgacatctccctctcctcccctggcctatgctggcttgattgcatcctggttcaaaggctgggcctttgcacactcaggaaactgaccaaaagtgtctgagtctcatgtctccagaggaggctcaatatctcactggtacatgcctggactgtggtggagagaggacagagagcccccggtggcgttgggaaatacagtccgctaatgtgacaggaaataagactgaggatgcaggagtggaagggtgagagaagaaccacagagctgggctgactgagatgagaggggcatggagtggtccttagtgactgtggaaagaaccagaccacaggagggatgggagatgggtggggtctaaagtctgttcactgctttgagcagagtgcatgagtgtgcacctgtgtgcgtgtgtgtgtgcgtgtgcgggtgtacgtacatgtgtgcgtgtgtgggtgtatctgcatatgtgtgtgtggtgtatgtgcatgtgtgcgtgtgtatgtgcatgtgcctgtgtggtgtatgtgtgtgtgtgcatatgtgtgtggtgtgtgtgcatgtgtgcctgtgtgcatgtgtgtgtgtatgtgcgtgtgtgtgtggtgtattgcatgtgtatgtgtgtggtgtatatgcatgtgtgtgtgtgcgtgtgtgtgtgcgtgtgtgcatgtgtgcgtgtgtatgtgcgtgtgtgcatatgtgcctgcacatggggctcacagaaggtggaagccagaaggcagtaattctcattcttgctcttcccaaatctgattgcattcaagctctgattctctacctctgctcagagacagacccagaggcaggtcccagcttcagagaggaggtctttcctacctatgccgttcctgaagatggtgatggtctgtggagcatctgggataaaaagatataaacttggcttcagcagtgaggagtgagatgggcatgggcccaggaggtacccaaagaggagccacagaaacccaccaagcggggaaggctgtcctgtctcactccccgcagatcccaaggcttagatccacacacaaggtttctcaagttattgttttgtttctctctgtcttccttacacacacacacacacacacacacacacacacacccctcactcccactgcccttgaggactcagctgtgtccccagcaccactcacaggagacattgagctggacagttctctccgtggtcacctgagctccttggcgtttcatctgacaggtgaggttggtgccatggtcctcgggcctgggggtgagggtgagctccgaggagcgggtggtctcggggtccagggggctgagggcattccccgtccaggagaatgtgagaggtggtcccgcttcacaggatcctggaaggctgcagctcagccttgtggggcggccggactccagaggctccagaaagtggatgtcgggtttctctatcagggctgaggaggagacagggagatacctgggccccaggggcttgaggacgtaaggtgtgaccccgagagtggccaggcctcaggccccgacctgccccaagtcctacacctcctccagccgcccctgcccaactcctgtccctgttctcatacgggggtctccacgtcccagggtcctctcctggggtccctgccatacctgtcacctccaagttcagcttattctgttggtagctatattttacatcccttcctctctccacgcggaagaaatagcttcccgtgtcctccattctggcatctccgatgctcagggagcagttcttcttctggacatccccaaggaggcggaatcggccctgggtctctggcttcactcttctgtctgggttgtttgtggccacaacctcagcgtagtatgggatctccccgtcccggaaccagtagacgtagagtgggggagaggaataccaggatctccaggggtaagagaaggagcagggcacaaggacgcacaggccctcctgcaccgtcaccgacttctgcacttgcagctcgtacactggcttctcctgcagggaccctggggggacacagaagctcagctgcagctccagccccccttctcacccctgtgcctgtccctcctccctcagctcactcacccccccacagcaggggcagcagcagcaggggcagcatgtctccatccgccagggccccagcccagtcccaggtccggctgtcagggaaggaaatgctccaaatgtccaaacgtggggtggggctgagaaagccccgacaggaagccggagggtgagtgagagctgtggacgcgcacagaaggggaacttgggcatcacgtgctgttggggtgaggcgggggctgggaagccattctgctcccaccccgactggacgccgcaggtgaagatactgaggcccccagacgatgtgaggcttgtccagctgaggatctggaggtgatcacccctcaaatgatgtttcagtcatgagtgagatcctcagggggctgaatgcagaaagaaaagagaaacaagggcttgtcctggtgatgaggtgagatgtcagaaccaccctccacctaaaaaccatgaaacattctggaaatacataattttaaatttgattttaaatgttcaaagtgaccaggcatggtagctcatgcctgtaatcccagcacttcgggaggctgaggtgggagggttgtttgagcccaggagtctgagaccagcctgggcaacatagcaagtcaccatctctacaaaaaataaaaactattagctggtgtggtggcacacctatagtctcagctcctccggggcactgaaataggagaattccttgagcccaggagtttgaggttgctgtgagccgtgatcgcactacggcattccagcctgggcaacagagtgaaaccctgccttaaaaaaaaaaaaaaaaaagttcaaaagggctgaaaaaaaatttttttgacccaaatttcgtggagggtcagagcatgagagagctgaagcactcttatgttaagaagattcttgggacacagcacagtccactttgggtcttgatggacctgagggtcttgtgggacggcagtgaaacacaagccctgctaaagcctcatcctattaaggagctacagaagcaaatttgccactgtgaggctgatgaagctcaatcttcaatgccctcccttgcaggatccacttttcagatgcccaggaggggcccacgcaatgtgtggaaataacctgccttgttactgctcttttatgaaagaaatttcataatagtttcccaaaatttaacaatatattaaaaatttttcacattccgattaatgtgttgtgagaataaagacagtttcttaaactatcaatgatcaaaacaaacgtcaaccacccatgccagaagaaataccgacttctctttctattctatctataaaaattgtattataaaattattctccaatattggccgggtacagtggctcacatctgtaatcccaagcactttgggaggaggaggcgggtggaccacctgagatcaggagttcgagaccagcctggccaacatggagaaacctcctctctactaaaagtacaaaaatttagccaggcatagtggcgcacacctatagtcccagctactccagaggctgaggcaggagaatcacttgaacccaggaggcagaggttgcagtgagccaagatcacggtactgcactccagcctgggtgaccaagtgagactctgtctcaaaaagaaaaaaattatcaccattatgaaggcaatcaaagaaaatcagtcaaaaatatagggaaaaagtatgcaggtgtagcagacaggtagactatactattaacaaacatagtatgccatttttctgagttgtctcatattttgacattttagattttgtgatttgatgtgttttctcagtccaaaaatcatcctatgtgtgccaaattttgtatttttgtatttttttttctaaagagtcacaaagactctcttcttaaccaaacttatgaaagctcctctgaacccttttttcaactaggctttgtccttgggactgccttgtccagctgtagcaagaatcctgctaagttggttttgcaagactcttgatatctgatcgccttcactatctgatcaaattccctagccctcacccttggtatctgatcatgctggcctgctttcagcaagaatcctgttaagtcagtttagaaagaatcccggtatcttcagtgtctcctcttagtagttttccgtccactaacacacacggccagcctccctcacctgctgcactatgcttcttgcccataaacccccctggtctttgctgtattccgagttgagcctgacctatctccattattgcactagtctttttttttttttaattgacttctgtttttttcttctgagacggggtctcactgtgttgtcccagctggagtacagtggtgcaaccttagctcactgcaacctccccctcccaggtacaagcgattctcctatctcagcttcctgagtagctgggagtacaggtgcatgccaccatgcccagcttatttttgtatttttagtaaagatgggggtttcaccatgttggccaggctggtctcgaatgcctgacctcaggtcatttccctgccttgcctcccaaagtgttgggattacaggcatgagccactgtgcctggcctgcactagtcttgatacctgtctcagtcatcctgaatagtcaatgttaacaggtgtcagaataattttttcttttttctttttcttattgcaaattctgaactttattcctcatttgaactgtgaaagtaattcatcataccggctagtaggatctaaagataaagacttgattatgtaggaaaatggtatttttatctttatattaaaatcttaatattaaattccctctcctaaaatacatagtatggcttctgttttcacatcagccttaactaattaaatctcaagagatgaataagtgagcattgggtgatttcaaatccctttatgatataattcatagccaactagaaattctctttagagaatttcccaaacaagataaagggtgtcttcagcaaacatcatatacctaatgaagtagcttcaggtcctagcataataaggcaataaaaataagcaaaaggtacagcaattacaatgaaattttaacagaggtctttatcaatgacatgactgcacatatagaaaaatccaggctaagcgtggtagctcacgcctgtaatcccagcactttgggaggctgaggcaggcggatcacgaggtcaggagatcaagaccatcctggctaacatggtgaaaccccatctctactaaaaatacaaaaaattagccgggcgtggtggtgggcgcctgtagtcccagctactcgggaggctgaggcaggagaatggtgtgaacctgggaggtggagcttgcagtgagtggagatcacaccactgcactccagcctgggcgacagagcgacactccatctcaaaaaaaaaaaaagaaaaatccaaaagtatatacggatacatttgaagccttaataaaatatttgcaagacagccagagattaatcaaattacaaaatcagttgtctttccacatcacagtaataaaaatggaattttataaaaatgccattgacaaaagcttcaaaaattatgatataatttatcaatatcaaaaaatatgatataatttttgaatatatggaatatatctaactattagagatgtatctaacaaaaatatgtatatgtcacctctatggaggaaattataaatctgtattcaaggacattaaagatgtaaataggctgggcgcagtggctcacgcctgtaatgccaacactttgggaggccgaggcgtgtggatcacctgaggtcaggagttcgagaccaccctggccaacctggtgaaaccccatctctactaaaaatacaaaaattagctgggtgtggtggcaggcacctgtagtcccagctactcagtaggccaaggcaggagaatcacttgaacctgagagatggaggttgcagtgagtcgagattgcactattgcactccagcctgggcgacagaccaagactccgtctcaagaaaataaataaataaaaaataaataaatcaagatgtaaataaactgaaaaagaggccatgttgatgagtttgagaacaatattgtatgaatgccaattttacccaacaatctacagcatcaaaggaatatgtcatacaatctcccgggtgatttttgtgcaatttggtaactctattgtaaaatttatactgaagtagaaatgttcaagtatggtcaaggcaaccatgaagaacaatgaatggctttgcaagataaaaagatgtatcataacattacagaaaatatgaccatttcagacggggcacagtggctcacatctgtaatccccgcactttaggaggccgaggcagatggatcacttaaggtcaggagtttgaaagcagcctgaccaacatggtgaaaccctgtctctactaaaaaataacaaaaattagctgggcatcgtggcatgtgcctgtaatctcagctgctcaggaggctgaggcacaagaattgcttgaacccaggaggtggaggttgcagtgagctaagattgtgccactgcattccacccagggtgacagagtgagactgtctcaaatttttaaaaatgtgagaaaataggcccatttcaatggttcacacctgtaataccagcgctatgggagaccgaggcagaaggattacttgagcccaggaattcaagaccagcctgggcaacatggtgacaccccatctgtacaaaaaacacaaaaattagctgggcatgggtggctcatgcctgtagtctcagctacttgagaggctgaggtgggaggatcacttgagcccaggaggtggaggttgcagtgagccaagattgcagcactgcactccatccaaggtgacaaagtgacacagtgagaccttgtctgaaaaaaaaaagtgacaattatgtattgaccaagtggaacaaaattgagtgcctggaaatagacctcaaccacaggaaacatcaagtgtgatagaggaagtggcaaataataaatttttctttttatttattttgggtttttatttatttaattttttttgagacagtgtctctgtcacctaggatggagtacaatggtgtgatcagggctcaccacagtctctatttctctgggctcaggcactcctctcatctcagcctcccaaatagctgggactacaggaatgcaccattatgcttggctaattttttaattttttgtagagacaggttctcactatgttgcccaggctggtctcaaacttctgggctcaagcggtcctcccacctcaacctcccaaagtgttgggattacaggcatgagccactgggcccggccaacttttcaaaaaatatctgtgggcaaaacttaatgcaatcaagtttgcagtaagtttgcaatgaaatttgactcccagctcatgcataaaagtcaagtacaggtagcttgaaggtctaaatatgacaaagaaaacaatagagctgttagaaaataatatagcaggaaatcgccatgaatttgaggtaggtaggatttctgagcaaaacataaataacactatttatttatttgtttatttttattatttattattattttttttgagacagagtcgtgctctgtcacccaggctggagtgcagtggcgtgattttggctcactgcaacctccgcctcccaggttcaagcgattctcctgcctcagcctccggagtagctgggactacaagcacaccccaccacgcccagctaattttcgaatttttagtagagacggggttttaccatgttggtcaggatggtctcgatctcctgacctcatgatccacccaccttggcctcccaaagtgctgggattacaggtgtgagccaccacgcccagccaataacactatttataaagagaaagattgaaaacttgacccctggcccagacactgagctctacctctctgaggtcttgcctccacaggacctgcacatccaaaggtcttttctccccaggaccctgacatcctactccagctcccataagccatgctaaggaggctgattctctccatgtttctctggcttccaaaggggaaaactgaagggcacctgcagagcacctgaagcccagaagtaaaggtgaccactgagacaaggagtgaggtagcagtcatgggtctcaggtccctgaaaggagaaggcagcacctttttgagagaaggtaatgggtgtttcctctccatttggctccagggtcccttcggagtgatgagtaactccatgtgtggtcccaccctcatctccacctcttgttgctcactcttggagaacttgtgcccctgtcactctcacagtgactccttaggtaaaaggtttatgttctaccacatcctcttaagatatatctcccactaactcccatctggaatcccccagtgctcagagaagagttattgtcctgggagcaactgaggaggtgacattgatcttgggaattctattttttattttcaccctctctttgtgatcgatcactagagaacagttaccacgtgcctggctgcagtgagttttaggattccaggatcccaggtgtaggagaatgtacaaaacattaggtcacttgtttccttgggtgagagacagagatacctgtagggccagccccaaaccccacctggtcctctcaagcatttgtcccactcaacactagaggcatctctcaagctggagatcccagatcttgccctgggacagcttcattcccccaacccccatcctctgtgctgtctattaagtgcaagaaacaaatggggtgagagaagaggaaattgcaaccagaagccacaagatatagacagaagggcagaaaaggaaatttccccacagcctctaccaggaaatctgggccccaagggcaaggaagaggccaggctggcccacctcaggggcacaatgcccattctaataaaagtaaagtaacacaaaatacagaattggatgtaagaaggaaaaaaagaattgaggtaaagaaattaccattttcacattcaagaagggctacagagtttgcctcaagagaaaagtgtgtatatagtttatcactactttgttttcaaattaaactggtgataatattttttattgaggtgaaattcagacgaaaaaattactagtggtaattttggatgtataaacttttgaaggatgaggtgaagaggaagctaaaatgatgctggataaaaaaaggaagatgaacgttaaggctcccccttgtggaggatagagaaagcatttttaaaagttctggattcagtggcaatgagatgaggatttgggggatgacctcttggactcaacaacgtggtactaggacacaaaatccagtgaaagactttctgtggtggggatgaatggtgaatttttgcaacacgatgtctagcatccaatttaacctacttcttatcctgaagagccattcctttctgctgctcccaaaccttgaatgaagagtgctacccaaaatatacttgtacaaagtgctgggaaaggcaggaaagaagtctttgttctcacgtttggggaagggataccagcttgcatatgtcaatcacccatcaccctcaggaactctcccacatattgtggtaagttggcagctttgggttctctgtgattattaagcatgagagatccagttactttctggggatcttaaaatctgaacaggatgcaagatttgggaattactggtttgtaccatcaaaacttaaatctgctcttaaactcttggaatatatcagcctggtgcagtacaattttaacaaattcaaagcaggagaggaggagctgagaacaaagttacaacctgtgactgagttgatggtatgataaattgaggcaggaattatgtggaggcaattatgaaggactccaactaggagaggtgtggactgagagaacaccctggtagctatgaagtctttacttttgattgggcatccattggatagatatattcagcttacatttctattatatttgattgaaagtgttgacaaaaaaaagttttattttggtaaaataatgcataacacaaattttaacattttaaccacttttaaatgtatggttcagtggcactgaatatattcatcttgttttacaactgtcacaaccatccatttccagaactttttcatctttccatactgaatctgtgtactcattaaacactgactctccatttccttctcatcccagcccttagcaagcgtcattctactttctgtatctatgcatttgactatctcagtatctcatataagtagactcttatgacatttgtgcttttctgtctggtttatttcacctagcataatgtcttcaaagtcatacacattaaagcatttgttagaacttcattccgttttaaagctgaataagattttatttgatgcatactacattttgtttctccatttatccactgatagacatttatgttgcttccatgttttggctattgtaaataatgctgctgtgaacattggggtacaaatatcagactccctgctttcaattctttggggtatctactcagaagtggaattgtggaattgctgaattacatagtaattacatgctttgtttttcgaggaattttcataccatcttccatagtgactgcaccattttacatcccaccagcaatgcacaagggtttcaatttctccaaatcttcaccaatatttgttattatctggttttgttttgttttttaatagtggtcattctaacgtgtacgaagtggtatctcataatggttttgatttgcattcctgtaattattactgtttataaaattgtataagtatttatgtgttggaaattataaattagttttcaatatttcaatattgagaagtgttaaaataatatgaacttactcaacttacctttcaaaattggaagatctagcactccccttatgacagtgattaactggggatgaacaagaactgcctcttttactttgccacactttctattctgtactttggtggttcaagctatctcttccaatgaaaattacccaaacaataaagaggggaaaaacataggatggaaaagataaattgtctcagtccatttgggctgctataacaaaataccttaggctgggtgatttataaacaacagaaatttatttctcataattctggaggtcgggaagtccaagatcaaggtgccagcggattcagtgtctggagagaattatttgcttcccagatagtatcttttcgtggtatcctcacatggcagaagaggaaaacacacttccttctgtttcttttatgagaacactaatcccattcatgaaggatggcaccattatgggttaatcactttccaaaaagccccaaccttttaataccatcaccttgaggtttaagatttcaacatataaattttgggaagacacacatttctattatagcataaataaagtatatcaagagttaaagcatatagaaaaaaagcaaatattgcactctctttgctacatgcacttagggaaattaaaagaaaaacacctgaagtttataaaagttaaattcatgaaaaagaatgaagaaattataaaagcagcaagacataaacagatattgccttaaatggaaccacaataagaaaatgatgactgaattgtcatgagaaactcacccgccctccaaagtggaatgacatctccaaaaggttaaaagaaaaatgcaaagctagaattctacattttggaaaattatccttcaaaacgaaagagaaggagtcgtgcttttattatgaaggagtaagctcctagcagagtgaactcaccacaacacaacaaaacaaacaaacaaaaaatccttacaagttataagctttgaatggggaaaaaaaactacttgggaaatgggataaaagaaaatagattctggaacgggagtcaatatttggggaaaggcaccaacaaggaataaatagctttattccaatggtaggtcagagctacagtgcagaaagtggctgctaaaattctaatacaactccttccatctttctggactgagaaacaagggatgaagcccagggcaactaggaacactgaaacaacaggtaacaattctggaaagggaagagctagggaaaaggaactccagcttctgagtataaatgctttccatttcaaatataatgaggtgaggctaggacttaaaggatgtgaaaatgcatactatgcaaatactagtcaaaagaaaactggaatggctatgttaatagcagacaaagtacacttaagagcaaagaaaatcacaggaacaaaaagtgatgttacataatgtaaaacagttgattcagccaactgcggtggctcacgcctataatcccagcactttggaggctgaggcgggtggatcacctgaagtcaggagttcaggaccagcctgacttacatggtgaaaccttgtctctactaaatacaaaaaaaactagccaggcgtgatggtgcgtgcctgtaatccaagctatttgggaggctgaggcaggagaatcacttgtacctgggaggcggaggttgcagtgagccaagatcgcgccattgcactccagcctgggcaaaaagagcgaaactctgtctcaaaaaaaaattttttttaagttgattctttaagaagacatgagaattcttaatatgtatgcacctaacgacagagtttaaaaatacatgcagcaaaaactgatgaaactgagaggagaaactgacaaatccaacattaggatcagagacttcaacattcctctctcagtaatagactgagctggtagacaaaaaagttaccagctataaaactgaacaccattggacaactatgtctaattgccatttaatattcgtcccataacagggcaatacacattctttctaagcacacatggagcattcaccaagatagaccagtgtcatcaagcaaacttaaccaatataaaagactctcacggttggtgaaagtgaaagttagttcagccattgtggaagacagtgtggcgattcctcaaagacctaaacatagaaataccattcgactcagcaatcccattcctaggcatatacccaaaggaatataaatcattctattacaaagacacatgcatgcatacattcactgcagcactattcacaatagcaatgacatggaatcaacctaactgcctatcagtggtagactggatagagaaaatgtggtacatatacaccatggaatactaagcagccataaaaaagaatgagattatgtcctttgcagggacatgagtggagctggagaccattatcctcagcaaactatcacaagaagagaaaaccaaataccacatgttctcacttgtaagtgggagctaaatgatgagaacacatggatacatagaggtgagcaacacacactggggcctttcaaagggtggaaggtgggaggagggagaggatgaggaaaataactaatgggtactaggcttaatatctgggtgatgcaataatctgtacaacaaactcccatgacactttacctatgtaacaaacctgcacttgtgccccctgaacttaaaagttaaaaaaaatcatatcaagcatgtgtatttattaaaatggaacttaaaaagaaagtagtaacaatttgtttaaaaataaaaaaccagtaaaatctgcaatcacttagaaattaaacaacacacttctaagcaatccgtgaattcaaaggaaatctcaggggaaagaaggaaatattttgaactaatataaaaatacaacataacaaaacttttgtggtgcagcaaaagtgattaaagggaaaatgcagaaccagtggatacagaaggctgactgtacgatattaaaagcaaaaaaaaccccaccaaaactgagaatgagctattgatacgtgtaacaacgtggataaactgggaaaaccacactgaagaaatgaaagcagaccctaaagcaaatatgtttggttccagttatacgatgcacagaacctgacaatacaggtattgccttcttgtatatggacagaaggagaatcacttgaacctgggaggcagaagttgcagtgagctgagattttgccattgcactccagcctgggcaacaagatagaaactctgtctcaaagaaaaaaaaaaaagacataatttttgtctacaaactctcacagaggcattaaagagtaaaatcagttatgttgtattgtttcataaaagttttacttattttgtaacaattgtattggataataatcacaatgaggtagagttttaactggaaaacaaatgctgcctctctgtgcctatatggatagggaagctgaggagaccagaaattcaagtgttaagaaggtaacttttggcagccaggcacggtggctcatacctgtaatgccagcactttgggaggccaatgcagtggattgcttgaggtcaggagttcgagacctggccaacatggtaaaaccccatctctactaacatacaaaaaaaaaaaattaactggatgtggtggcaggcacctgtaatcccagctactagggaggctgaggcaggagaattgcttgaaccccagaggtggaggttgcagtgaacggagattgtgccactgaactccagcctgtgcaacagagtgagactctgtctcaaaaaaaaaaaaaaaaaaaaaaggtaacttttgggtaatgggtaatgggggtataagaccgaaagtacattcccttcacagggctggagatggtggatggagagggaagagaagggcaggtggagaggggatggggtgcagatggggatgcaggtgtggtggggcaagactcacaagcagaggggaataagtagaaggggtatggggcaggaaggaaaagaggggtagtcagtgggatgtgagcttccagaaagaagctgacagtgatgtcctgcatgtgtcccacagggctaagtgtccacacctcagttctgtcttgagcgggaggggctcagccaggcctctcagccctgctctgctgggggcctccacacctgcagagccaacatgggcctcagatcagcaccagccacttcagttctaattccaggtggggctgagctgtcctggggcaggacagctcagccccacctggaactcaggagcttcctggagacaggcagtccggctcacctggtatagtagatccaggtgaggccataggtgaggaggaagccagcccccatgagagcccccctgatcagggtgaggacgaggggccaggagccctgctgtttctcagttacacatatgcaggaagaggagcttcctgggagaaaggagaaggtaaggtgctgttaccaggcctcagtccctcccaccaacctgaatacctcaccgggctgtctaccctcagcacctgtcctgcaactcactctgcacagaaaggatgaaggacaggtgctgggagcccagcggatgctgaacccggcaggtgaattcccctccctctctagctcctatgttaggcagctccagggtcccagacattgaggtctgggaaggattgagggcttttccctcccggaaccagctcagtgaggcaggggggttgctgtcaactgtgcaggcgaggaacagggactggccctcctggatgggcaccgacatgccattgctcaggatccgcagggctgggaaagagaagcacagccaggtgagtggagctgggaggcccaattctccctcattcctcccactgagctgcaagaagaaagacaagactgtgtggtgagtgctgagaatgggctagtcatgggtgaaaggatgaggacttggtgatcaggtcaggctaccagaaagaaggtggctgagctgagaaaagacagatgaggaggagttctcacattaaggagaagtggatgggcagctcaggtgcagacgtgccaagaactgagacaggcagacgaggaaagaggctcctagatccgcaacctgtcagggaggacccagagctcccaagacacgataatggaggtagaagcaggctcagatcttttggagcattgggtgccagattgagggccttgggctttatcctggaaagcaagagggggctataagcaagggaaacagagttagcactggatctagaaagatcctgctggagccaagtaggtcccggactggagagaagtgggataggaggcagggaggctgggaggaggctggggcaatgggccagggttgagcacgagacttgagctgggcctggaaccaaggggatgaggagggaagtgatgattggtgaagtaaaggtgttaagacttgcggactcatgaaacagctgatgagaaagggtgctgtctacagcgatgtccagaacagccctgggatcaacagggaaggaggagccgagaagcatccgagggaggtggctaaatgtgcagatctgtgcctcagagaaagggctggatataaagttgtgggaggcatcaggacagggtcaaggagagatcggattactcaggaatgtggaggggaagaactgggttctgggacagagctgtgggaggtgggaaagtcgaaggctcccaaaaaggacgatcagttagagatgaagcagggcatgcatcagaggacatcggagcaggcagaaattcaagaaaagggaacagcgtgtcctgagtactcaaactcacagagacagaaaagtagaatggtgactgctcggtggcaggagggggaagtggaaagtcgctgttcagtgggtacaaagtttcagttttgccagataaaaggagctctgcagtttggttttgcaacaatgtgaacacatttaacactgctgaactgtactctttaaaatggctaagatgacaaattttgtgctatgtgtattttctcacaatgaaaaaataaatctgaaaaagagagcagagaaaagggagaagccaaaagaaatactaggtctgttcgtgcaagatcttagtgactgggattggggggttgggagcaggaaggacccagacccaggggctgaggggtgagggagggtctcctctcccaatgctgaaccctgagctaatagaaggctcccatcacagccccagagggaagagggtctttcctacctgtgcctgtgccatttctgaagaagatgctgatggcgaggttctgtggagcatctgggatagaaagatacagcaccagcttcagaggtgacaagagggatgggcgtggtcccgggagggacccaaggaggggccacagaaacccaccaggtggggaccgctgtccttcctgcccacacacgagttttccctggttatcattctctttctctctctctcttctacacacacacacacacacacacacacacccccctcactcccactgcccttggggactcagctgtgtccccagcaccactcacaggagacattgagctggacagttctctccgtggtcacctgagctccttggcgtttcacctgacaggtgaggttggtgccatggtcctcgggcctgggggtgagggtgagctccgaggagcgggtggtctcggggtccagggggctgagggcattccccgtccaggagaatgtgagaggtggtcccgcttcacaggatcctggaaggctgcagctcagccttgtggggcggccggactccagaggctccagaaagtggatgtcgggtttctctatcagggctgaggaggagacagggagatacctgggccccaggggcttgaggacgtaaggtgtgaccccgagagtggccaggcctcaggccccgacctgccccaagtcctacacctcctccagccgcccctgcccaactcctgtccctgttctcatacgggggtctccacgtcccagggtcctctcctagggttcctgccatacctgtcacctccaagttcagcttattctgttggtagctatattttacatcccttcctctctccacgcggaagaaatagcttcccgtgtcctccattctggcatctccgatgctcagggagcagttcttcttctggacatccccaaggaggcggaatcggccctgggtctctggcttcactcttctgtctgggttgtttgtggccacaacctcagcgtagtatgggatctccccgtcccggaaccagtagacgtagagtgggggagaggaataccaggatctccaggggtaagagaaggagcagggcacaaggacgcacaggccctcctgcaccgtcaccgacttctgcacttgcagctcgtacactggcttctcctgcagggaccctggggggacacagaagctcagctgcagctccagccccccttctcacccctgtgcctgtccctcctccctcagctcactcacccccccacagcaggggcagcagcagcaggggcagcatgtctccatccgccagggccccagcccagtcccaggtccggctgtcagggaaggaaatgctccaaatgtccaaacgtggggtggggctgagaaagccccgacaggaagccggagggtgagtgagagctgtggacgcgcacagaaggggaacttgggcatcacgtgctgttggggtgaggctggggctgggaagccattctgctcccacccccactggacgccgatggtgaagatactgaggcccccagaggggcttgtccagacttgtaagtctagactcctgaggtcaccaggtcccatagctgcagcactttccttatgcacctttgtctacataggaaggagaacaccacttggccagctccctgggagtcagggcctcgggaccctcagcgagatgggagaataaatcctttatgacatgataggagctgtggtgagggaagcacacgctgggggtttcaggtggggaagactttcctctttccagagggaaggcaagttgtcagggacaaacacatcaggtggacatgaccgggtccttagcagtcaagagagatgtggtccccaccaccagttggatttgggaacctcatctcatccttgtccttgtcccaggcagcgtcagaccccatccctgatgttgacagccagatgaggcttgagagccgggcatttgaaatgtgaacgttgaggatatggaataccaagtgtgaacccagacccctcacctaccggctgttgaactttacaaaagttacctaccctctctgtgcctcagtttgctcagctgaaaaatgcagacaataatagaattgctgtgtggggattcagtgaggtctcatgtgtaaagtgcttaggacagtgtctggccccgagaattcactcattcaactgatgcttcatgggcgcctatggtgcaccaggccccctgttttaggagctggagatacagcaaaggataaactcttaggatgagaaggtaagtcaaaaatcctagtgggggctcctctgggcacactgcttatgcatacccctgctccacgaagaacagtaaaaaaagaaggccgggcgcagtggctcacgcctgtaatcccagcactttgggagaccgaggcgggtggatcacgaggtcaggagatcaagaccgtcctggctaacatggtgaaaccccgtctctactaaaaatacaaaaaattagccgggcgtggtggcgggcgcctgtagtcccagctactgggggggctgaggcaggaggacggcgtaacccgggaggtggagcttgcagtgagccgagatcgcaccactgcactccagcctgggcgacagagcgagattccatctcaaaaaaaaaaaaaagaaaagaaaagaaaaagagaaaataaaataaaaatcctagagggaagacaaacatttaatatgaaattaaaatacacagtctgctaaagaataatatattctaagaaaaaataaaaacaggaacacagaagaggaatcagtgaggactgataatttttttttttttttttttttttttgagacggagtttcgctcttgttgcccaggctggagtgcaatggtgtgatctcagctcactgcaacctctgcctcccaggttcaagcgattctcctgcctcagcctctcaagtagctgggattacaggcatgtgccaccacacctggctaattttgtatttttagtagagatggggtttctccatgttggtcaggctgggctcgaactcccgacctcaggtgatccgcccgtctcagcctcccacagtgttggtatgacaggcatgatgataaaattttttacagcatggcttggggggccacttggaggagatgacatttgagtaaagatgcgaagggcgtgtgggaatgagtccactggtatccattccaagggaaccgcacatttaaaagtcccaaggtaggaacacacgtggtgtgcttggaaaatagccatatgccagcattgaggggtgatcagtggggaagatggtaggagggtaggtctgggaggtgtcctgggtctgatcatgaagagatttgggagctctcataagaagttcacttttttcttgtccagctggaactatggaaggtgtcaaagagaggaagaagaaaaagaaggttcctgctgtgccagaaacccttaagaaaaagggaagcaatttcacagagctgaagatcaagcccctgagaaggaattttgcccaaaagatgcttcgaaagacaaggaagaagcttttctaggaaaaagcgaagcactatcacaaggaatataggcagatggacagaactgaaatttgaatgcaaggaaggcaagaaaagctagcaacttctatgcaactgcagaacccaaattggcctttgtcatcaggatctgaggggtcaatggtgggagcccaaaggtccgaaaggtgttgcagcttcttcgccattgtcaactctccaatggaagctttgtgaagctcaataaagcatcaattaacaggctgaggattcagaaccacatatcgcatgggggcacccaaacctgaagtcagtaaatgaactaacctacaagcgtggttatgacaaaatcaataagaagcaaattgctttgacagataacactttgattgcttgataaatatgtaaatatagcatcatctgctatataaggatccaattcatgggacctgtactgctggaaaatgatttgaagaaataacttctcgtagcccttcaaattatcctctccacaaggtagaatgaggaaagagacaacccattttgtagaaggtggagatgctggcaacaaggagcaccagatcaacaggcttcttagaagaatgaactaaggtgtctaccattatttatttttctaatctggtcagttaattaacagtacccactttcaaactgaaaacaaaaacctgacttttgctgagtgtattagccagggttctccagagaaacagaatcaacgggatgtgtctgtgtgtgtgtgtgtgtgtgtgtgtttattataaggaattgactcacacaattattgaagcagaaaagtcccaagatcctcagtcggcaagctggagacctgggagaactgacggtgtagctccagtccacaagcttccaggctggagatccaggaagagccaaagtttcagctctagtccaaaggcaggaggaaactcaggtcccagcttgcaggtagtcaggcaaaaggagttccccttactcacaggagcgccaggctttttgctctatccaggccttcaaccaactggtcaaggctcacccaccctggggagggcaatccactttactcaaagtctactgatttaaatgttaatctcatcccaaaacaccctcacaggaacacccagaatagtatttgagcaaataccagggcactctatggccctgtcaagtggagacctaaaattaaccatcacactgagcaaattgtgaagacaggggttgaacagagaaggggcaggattttatttgtttttacctgatcactctgcttgctttcctgagactagactctgctgagccattgcaatgcttgggaggtgagaggagggtgctcaggtctccaaggacacagtggaagtggtgagaagagggggagttaacagtatttgtcaacagattggacacacatgggaagagaaaggaaagggccacagataatgcttgtttttgacctgagatgttgcaggcttgaagctgccattgagagaagaggaaaagacttcaagagaagaatcgggagctcagcttgggacacgttgggttagatgtgcttattagacatacaagtggaaggaaaaggaaaggggttagatctgtgggtctggaatttaggaaaaataggaaaaagttctggctggagacaaaagtggggtcattcatgttcaaagagtgtctgtagtcatgagcctgagtgacatcacaaagagcatgagtttatttatttatttatttatttatttaagacatggtctagctgtcacccaggctggagtgcagtggtgcagtcatagctcactgcagcctcaacttcccaggctcaagcaatcctctcaccttgagtagctgggactacatgtgcacatcaccacgcctaactaatttttttttttaagtagagatgaaggttccactatgtgccccacgctggtcttgaactcctgggctccagtggtcctccggccttggcctcccaaagtgctgggattataggtgtgagccacaatgcctggccaaggcatgagttcaaatgaaaaagggacagagaccatctccagggcttccatgatctggatatcacacccactttcccactgaaaataactaaaaatacagggaagataattaatgcaagtcttctttaaaccatggaatggctgacaagagagaaaagaatttacagtcaaaactgtaggagatggcgggaaccaagagagggaagcagagcaccaaagtcacacgtgccctccgggaattttaaatgtggggaacttgaatttggggtttcctagacctgaggatgagagtcagactatgcaccaggtgtaggggaagtgcagggttcctggtcactctctctttctgcacacccccaggctctgtctagggaaatgaaactcaagtgcagccaaccccactctccgcccccatccaccctctgactgctgccccattcaatggcagggaggccagaagcatctctaggctggaggagacccaagtccctgccctggaatcacctcattctctaaccccatactctgattcatctactaggagcgggaacgcagaagagataagtgagcgggaaggaagttgcattcagaagatacaacacatagacataagcactctgattcaatagaagaggaagtttccccatgatgtctccagcctgggtccccagccacccttctgagagtatctgagttgatgtggaaatatgaacacaacaccacgctcttggtgtcagatctccagctccaatgctgagtccaatgtacaaatcttgtaacccttggcagacttgccctcatcttcacttcctcctctacacttttgggttttccaagtttgagggaaaggcagaggtctccaatggctctgatctcctatgcagtggtgttattatttgtttgcttgcttatttgttgactgcccacaacccagttcttcacccatagccctattttattttcctttggagaactaccactatcagccccatccctcacttcagcggggagtctgtgaattgtgcagggagcactgtccaattgacatagctcatcaccaacaatgctgcggccaattttaagaacaagcccgtgtccaattgcctctaaagatccaagttccaggatttttgccacaccttcaggaaaaatagctgttcagtttctcccggcatccctgggtggaagaaatgtaagcctgcagctgcctgagaacaaagtcaacagaggaaggaagaactctagggttaacaaacgacaaaaaaggattttagagacatcaaccaattctggaacctgctgtgcctgaagccggtgtacttcagaacttttcggctaagtgggccaatgcttggcttttatttcccaataggcccatttgagctagattgatcttgcttgcaccccaaagagttctgcctgatataacctctcccctagccactgtgttccacttcccctcagctactctgcgtcagaccctgaagctgccaaaagcctccctgtgagacttgatctcaatttcagagttcacaacccttccatgacttttgggaaagatcctgacatgtgcccctcccttataacaagaccctctgtgacagccatcaacataaagtcaattaccaggcctggtggcatgtgcctatagtcctaactgttctgaaggctaaggtgggaggattgcttgagcctaggagttcaagatcagcctgggcaatgtaatgagaccctgtctctacaaaaaatttacaaatgaggattaataaccagaatacgtaaggagctcaaacaactctaggacaaaatctaataatccaaccaaaaactgggcaaaagatctcaacagatatttctcaatagaagacatacaaatggcaaacaggtatatgaaaaggtacttggcatcattgataatcagagaaatacaaatcaaaattacaatgagatgtcatctcatcccagttaaaatggcttatatccaaaagacaggcaataacaaattctggcaagggtgtagagaaaagggaatccttgtacactgttggcgggaaggtaagttaatatagccactgtgaagaacaattttgaaattcctcaaaaaattaaaaatagagctaccatatgatctagcaatcccactgctgggcatatacccaaaaggaaggaaatcagtatacggaagagatatctgcactcccaagtttattgtagcactgttcacaaaagccaagacttgaaagcaacctaaatatccgccaacagatgaatggataaagaaaatgtggtgcttatacacaagggagtactattcagccatgaaaaagaatgagatcctgtcatttgcaataaccatggatggaactggaggtcactatgttgagtgaaataaaccaagcactgaaagacaaactttgcatggtctcacttattggaggaaactaagaattaaaacaattgaactcatggagatagagagtggaaggatgggttaccagagactggggaggatagagggcatgggggaggggagaaggtggggatggttaatgggtacaaaaaaattggaaagatgaaatgagacctcatatttgatagcaccacagggtgattatagtcaaaaataatttaattgtatattttaaaataacttaaaaagtataattggattgtttataacacaaaggataaatgcatgaggtgatggatacttcatttaccttgatgtgattgttacatgttgcatgcctgtatcaaaatatcttgtgtaacccagaaatatatacacctactatgtatccacaaaaatttaaaaacttaaaaattaaactaaaaattaaaattaaaaaatacaaaattagccaggtgtagtggtgcatgcatgtagttgcagctactcaggaggctgaggcaggaggattgcttgaggccagaggtcaaggctgcagtgagctatgatcatgccactacattccagcctggacgacagagagagatgcaaccctgtctccaaaattaattaatttattaattaataattaaaataatcaaaaccagttgtaaaaataaagaacaactaaatgagaacaaggaaaggctatgtattcagttcttgctatgacaagagagtcagccaccattatttgtgttctggcagagactcacaggcaggcagtggagtgggagagcttcatagtggggaaaagagaaaacttcaggtgtgtcctgattggaggctattggcctggggaagctgtaggtgagccagctagaagcaggtaatcctacatgattgggttaagaaaccatatccactttctctgatttggtcctaagtagaaagtggggacagaaattagggaagctgtcagttattaatcaagtcccaggccaatttagggccaatcgttacagggattattgtttagcttcctggacaggttaccagagacaagtctggtttatagagagtagcctggcttcctgagctggtgactgtggatgatgggctggcttttcacagctggttgctgcaaattaggagtcagagttctagttttatatatgatctggccatttctgcatgtatattcaggctctcacagggtaggagagcaattttccacattcaaaaagagatacaaaatttatttcagggagaagacctatatacttgtttttcaaaacaaatcgatcacctttttgggtgtctaaacagtaagcccaggactagcctggagggtgagctgaagaacaggctaaattttctctgcataatagaataatgtgaatcctaagattgtggctgagagagaaaagacagcaaatgtcctggtcttgatggcaatggaagtggtggggacatgagctggtgttctcttttgatagatgggaccccagcagcctggtgacagcagacatacagccggtaccaggttctgtggcgtggagatggatggtggagattaatgtcccatgtaggttgctctgttagggctctgcctactggacctggtgagctcagcatttttgacacgtcttttgggaccattcactactgctttccccaaactttctgtatgttttacacaatatcactggattaagaggaccgaggaatgcaagaaggaagtgtttgttcccatgtcaggaggaaagaacagcactgtgcaaatgacaattaggagaataccgttatctaccgtaatcttcccaaataatgtacagggtgggaagtttgggattcactgtacttctgtggcttgggttccatttatttcctttagactttaaaatcctggaagggtgcagcattgggggatctctggtttgcaccctgcacaatgcaaaaatccttgaggatatcagtttggtatcaccatcatgtggacatcattgaaggtagggaaggggaactgagaacaaaggcagaacctccccacccccctcccccggcccgcgtctgagaatgtgaaacaatgttgtgaagctgaagtatggacaggaaatgatgaaggactccaactagcataggtatagaccacaggaaggatgggatacatgtttgaacagtggtggcatcaaggctgaagaagacaccaggcacctgtaaagagtctctctcctgaggcaggtggatcacttgaggacaagagttcgagaccagcctgaccaacatggtgaaaccccgtctccactaaaaatacaaaattacactttgggaggccaaggcgggcggatcatgaggtcaggagatcgagaccatcctggctaacatggtgaaactccgtctctactaaaaatacaaaaaattagccaggtgtggtggcgggtgcctgtagtcccagctacgcgggaggctgaggcaggagaatggcatgaacccgggaggcagagcttacagtgagccgagaccgcgccactgcactctagcccgggtgacagagcaagactccatctcaaaaaaaaaaaaaaattagccaagcgtggtggtgcatgcctataatcccagctatttgggaggctgaggcagaagaatcgcttgaacctgggagacagaggttgcagtgagccaagatcgcaccactgcagtccagcctgggcaacaagagtgaaattccatctcaaaaaaaaaaaaagaaaagaaaagtccctctccccttgacttggcttccagtgagcaggcagggtctggctcctcttcgcattttgtttgactgggatggtttggaaatatttaactaatttacaccactaaaatattgggccgggcacagtggctcatgcctgtaatcccagcactttgggagccgaggtgggcggatcatctgaggtcagcagttcaagaccagtctggcccacatggcgaaaccccgtctctactaaaaatacaaaaatagccatgtgtggtggcacacgcctgtaaatccagctatttggtaggcagtgagcatgccactgcattccagcctgggagacagagcgacactttgtctcaaaaaaaaaaaaaaaagaaagaaagaaaagaaagaaggaaaggaaagaaagaaagaaagaaagaaagaaagaaagaaagaaagaaagaaagaaaagaaagaaggaaagaaaagaaaaagaaagaaagaaagaaaagaaagaaggaaagaaaagaaagaaagaaagaaagaaaaagaaagaaagaaaggaaagaaagaaaagaaagaaagaaaagaaaaagaaaaagaaaaaattggaagacaatctcacactgacatgaaagccccgactttcttggaaaataggaagatgtggtatcctcacatgtagcgatcagccgaggctgagcaagaaccaatcacctttactttgacgcactccccaccatgtgctatcatctccctctactaaagccaaagtccaggtgcgatttgtcggaatacttgcccagttgttttccttacacaaatccacttccctcatttgccgtaactgccttgaccatgcagaggtttgattcaggggcactggacctaccaaacaaaagatatcggatgtctctctttttggctcatcagcagaggtcaagctcccttgagaaagaaaaggaaaccaaagcccaagggctccccctgctggacccagtgagctcagcatttttggcacattacagacgttaaacttgaagagacacattcccaaagtattaatgcgcaaggccaagcctccaacggaaatgtacaacaaaaaaaaaaaaagaagaagaagaaggaaaataaaatagaataagacttcttgtctctgctcggacatgagaagaacttcgaagttgtcacttttgttcttacaacaagaaaaggctgaacaaactgagaatcaacagcttttcttagacacgtctaaagaactgcagtaacacagtgaattaccatccccaagtctggagacactggcaaatccagagagttactaatgagatccatttacacagggcagaagctgctggagtcactaactggtgaagacatttgcatggtaattctgacaagttgctgcaggctgggtaacaattagctcaagaatgataaatttctacaggtgtcagtcttaggagtccccacactttcgtggattttacctccagtaactctaccagtgaagagcccagaaaggccccctagcccatagccctggtagggagaaggaagagtaactgttgttaagtatacccagagcattctccccaacacaggcctattctccagggataaagaatttattggtaccttctcccacctggaagaagggatttctcctggccgggcatggtggctcgtgcctgtaatcctagcactttgggaggctgagttgagaggaacactggaggccaggagttcaagaccagcccggtcagcatggcaagaaaccccatctcaaaaaaaagaaggagaaggaggaacgaggaggaggagattttctcctgaatccagcacggcacattctagacttcctgtctcacctgaaatgaatggagagaagctgagaatcacttgtgaatgccataacccagaggcacaggtcccctaaaagacggatatttaatcgcagcgtgtttaataatgacttgcaaagctatacagaccctaattcctagaacctgtgaatgtgacctgtggcaagagagactttgatggtgtgattaagattctcaagatggggagatcattttgaattacctaagtggaccttcaatgtaattgcaagggtccttaaaagacaggcagcagggctgggcgcagtggctcatacctgtaatcccagcactttgagaggctgaggcgggaggatcacgaggtctagagatcgagaccatcctggccaacatggtgaaatcctgtctctactaaaaatacaaaaattagctgggcgtggtggcacgcacctgtagtcccagctactcaggaggctgaggctgaggaatcgtttgaacctgggaggcagaggttgcagtgagcctagactgtgccactgcactccagcctggcgacagagtgagactccgtctcaaaaaaaaaaaaaaaaagaaaaagaaaatcttcatcccttcccaagacaaagcacgaatattcctccccttgctcttaacgttcagccccttcaagaatgataccctatatctgtaacttcccagttctcaggagctgagaagttgatttgtaagcccagctcccacttccccaatcctgtagctgttgaatgaagcctgcactgctcaatactcactgttggtttcacatattagcttcatgacttggaacaggaaacagtcccctttctagggtgaccaggacccccagtaacaagatgggtctaggaaggaaaagcactgtgcactcccaggccccagcacctgggctcctgatttggggaagaattgacttctttaaattatcagatgttctgatcaggcacgggggctcacacctgtaatcccagcactttgggaggccaaggcgggtggatcacttgaggtcaagagttcgagaccagcctggccaacatggtgaaaccctgtttctactaaaaatacaaaaattagctaagcgtggtggcacatgcctgtagtcccagctactcgggaggctgaggcaggaggattgcttgaacctggaaggtggaggttgcagtcagccgagatcatgccactgcactccagcctggcgacggagcaaggctccgtctcaaaaaataaaaaattaaataaaaattaaaaaaaattatcaaatgttctaactcatcagcatggtgtagcttgccattattcaggatgttaattcctctcaacaatgtgctccagctttcagtgtagtggtcttggaaccattttgttagtttcacttttaagaatactgtgatttgaggtgctattttaaaagatactgtatcttaagtttaattttctgatagttgctaccagagatatagaagtgatttctgtatgttgactttggatgcagctgctccgctaaattctcatagttatatccaattagaggatattttggattttctatgtacgttatcttgtcattgaaaacaattatattttgcttcttccttcccaatcactgtgcctcttattcttcctgcttcattgaacccgctagtagttttattacaatgttgcataaagtggtaataacagatatccttgtttttcttgatcttagggaaaaagtgttcaattttcactattcagtataactggaagtccatgccacataaatacagtaacttcagtaccattcaccaataaaattctagttcatagttgtattcaatgtatacatagtgttttaatttttttattttaagaaacagtctcgctctgttgcccaggctgtagtgcagtggcacgagcacagctcattgcagctaactcctggactcaagcgatcttcctgccttagcctcccaaagagctggaattacaggtgtgagccaccacagcgcccagccatttaaaaaatatttttaattcatggatcacagtttaaaatttggagctctctcccagtaatctgaatgcctaacttctcttgaaataactgactatcttgcatgcccacgtaacagcaattagcccagggaagcaggagctgcccctctttactatgctgcattccccaccaagggctatggtctcccctgagctgaggccaaaacaagtagactgacaaagctttgtcaatatcttgccccattgtttatctttttgttgttgttgttgtcatttgagacaaggtcttgctcttgtctcccaggctggagtgtggtggcacgatcatagctcactatagtctccaactcctgggctcaagtgatccgtccgcctcagcctcttgagtagttgggaccactggtgtgtgccaccatgcctggctaatttttttattttttgtagaagtggggtctcactgtattgcccaggcaggtctcaaactcctgggctcaagtgatcctcccgcctcggtctcccaaagccctgggattacaggtagaagccaccatgtcccactcccattatttatcttaccccagtcctacttattttctatacctgcttttctcttgtagggactcgactgtgtaattcctgggaaaacagatgcactgagccattaaataaaaattcgtctagctgaaattgcttgaacctgggaggcagaggttgcagtgagccgagatcgcgccactgcactccagtctgggccacagagcgagaccctgtctcaatatatatatgtgtgtgtgtgtgtgtgtgtgtgtgtgtgtgtgtgtgtgtgtgtatatgtatatgtatatgtatatgtatatgtatatgtatatgtatatgtatatgtatatgtatatgtatatattcctctagccaggctgggtgcagtggctcaagcctgtaatcccagcgctttgggaggctgaggcagcaggatcgcttgagcctaggagttcgagaccagccttgacaatatagtgagaccccccccgcccccccacccctctcaagaaaaaaacaattcctctagccaagggtttactctctaacttcatttctcacggtggatccctctcaagcagagtccgggagccaatccacgtccaattgtgccccctgctggacaaggtccacttgttcagaggaaacttgcggagagatggagagctccagttgagatgctccagctccctctgccaacacagtttaataacaagtaataaagtagaaaaacaatatagcataaaaataattgaaaaattattttaattaatagtatgaaacaaaagagatggtagattagcagcttgctgctaataaggaaattaaattttctggtaaaattataataagcaatggtaagagaacagaataaaaataaaatgagaaaatctagcagaaataattaaggagatgatgacgatgaaaaaataaaattgaattagaggcgtgaaatataatacttggcacacagaaaacaaaagccagtggttcagagtccaagttcaggaaaatcgcacaggatgaaagggaaagaatcaaagaatgaagtaatgaaagggaaggttctccgaaggagtcagattatcaggagaattcttcatttaacttcttgctaataactagaaaactcgggataaattgatgatttttcaggaacatgtaaattacaaaaaaatattctcaaggagagacgtattaaatcaattgacaattttaatatacacagacaggatcatattaaattatttcaagctatcaacagacaattctgatataatgtaaacgaaagagaaaaataaagagcttcacaattgtttgtacagagcgagcatcacataacatgaaaacctaacaaggtaatacagaaaaggaaaagtatatagacaaatctccctatgaatattgacatggaaattccaaatatttggaatttagcgataaaaacctccagtaattttttttaaaataccagctgaatgtggaggcacagcctacagtcccagctactcggaaggctaaggtcagaggattgcttgagcccaggagttcaaggctgcagtgagctatgctggggccactgcactccagcctgggtgacacagcgagaccacatgtctttctgaggtcttggaggctaaaacgcacacacacacaaaaactcatatctctttaaaaataaataaacaaacaaataaataagccatgttaaaatggatattacctaagaataatgagatgattggatattagaaaatctattaaaataaattgtgtatagattaaaagagactatgatatcattttgttagatgtcgaaagggcatgtcataaaatatagtaacttttcccccaaaattcccttatataagattatttgcttaatctaaaattacatatttataatcttagatttacatatattatatttaatcttagatttatatatatattatatttacctacctgtctacctaatctacaaagccaaaagcagttaaatgcttctatgtaaaacattatgttgcccgccaccccaggacgtagtcctacgatcactactctttggcatcttcactcattcccaaagcaatctcatccagtccaaaggttttaaatactatcaaacattgataagtcccaaatatacatcttcattctagtcttcagtttgcagctttagatccatacatttaattgcctgtttggatatgtactctgcgtctcaaattcatcgtgtccaaaccttactctggacacccactccaagcctgctcctcctacattcttcctcatctcagtaaatgttaactccattttccagctgctcagaccaaggatcttggagtcttttttatcactcttccttctcttacaccctgcatccagtcagaaatcctctcagttctacattcaaaatatacccagaggctgggcatagtggctcacgcctgtaatcccagcattttggggagccaaagtgggcggatcacttgaggccagaagttcgagaccagcctagacaacatggtgagacatcatctcaaaaaaaattatatacatctatatctataatccaaatatatatatatatattcaaaactacttcttctcttcctcctcctgctcgttcttcttcttcctcttcttctcctcctcctcattcttcttcttttttttttgagatggagtctcactctgtcacccaagctggaatgcagtagcatgatcttggctcactgcaaactccgcctctcaggttcagcgattctcctgcttcagcctcccaagtagctgggattacaggcatgtgccaccacgcccagctaattttgtatttttagtagagacagggtttcaccatgttggccaagctagtcttgaactcctgaccttgtgatccgcctgccttgaactcccaaagtgctgggattgcaagcatgagccaccgcgcccggcctcattcttcttttctcctcctcctcctccttcttcttgtccttcttcttctcctctttcatcatttccatcctcctcttcttctttcctcacctcttcctttctttttcctcctcaccacttcttttccttttctgatcaatagaaccctgaagccaacaggtggggcagagcaagacagatagctgcgcagaggtcatctggaatggggagctccaagcagattgaggagggtatctacccagggatgtcagaggggagtgtcagaacctgcggagggagggcacttacatgtgtttgcacacagggatggccccttatgggtgtcagagcttgaacagggtgagtggagtcctttgccagagggcaccccagtagtgggaagtgggaccaagcaggatgaggagccagtcatgctggagaggagcagtggctgagatgagggactagttacactcaggagactgactgaacaaatgagtaaatatatcatgattaatgggaaacgagtttctcattctcagagaagggatttacacatatgggaaggcagaaaactacaaagacccatgtagtactggattgcaactagaggtaaaggagtgaattcatagatttcaatctgtttcatgaatgaaataacacgtgaatgcaaatgagagaccaattccaacaaagtcaggatcaagacaatggcacccaactatcacaatgattatttaacattctaacagtggggttcttggttgcaaaggaaaccaatttgggttaacttaagcaacaaaaaagaattcagtcataagaccttgggcagctgacagattcaatgaaaaggctaaagtaccaagtttagaaagtgggtcagaacccaaggaaacaatgaaagaagaactatctccaagtttccctagggacagcccagttcagtgccatcaaaatgagtactgagcccttctttatgtctttataaagtctcagtgtaagtttagtcagatacctgcatgctagccactaggtttccaggaaagtatgtatctagattttaggtccttagaggtgggaaggaggacttcctatcatgatggaaccccctaatagagaaatgtagttcagctgtgcactgcaaacaatgctccgagagtgctagcccaatgcaattacaaaacagaaccatataaatggtatcaaccctggaaaggatatatctttattatttgcaattagcatgattatatgtctgggaaattcaaaattaactgggaaaaggattacaggcaacacagtaactcattaaagtatcagttacaaaagggttttacaatttatcactattgacattctgaactggataagccttggttgtgggaggacagaagagatgttcagtgcattgtaggatgtttagcagcatccttggcctctattcactagataccagtagcactccctcccctaccaagttgtgacaaataaaaatgtcttcagaccttgccaaatgtcccctggggggaaggcaaaatcacccccatttaaattgggttgtgcaattaatttataagaatcaataactttcttacgttaaaaaactaaccaattaaaagttataatgaggccaggcaaggtgactcatgcatgtagtcccagcactttgggaggcaggaggagtgtttgagcctgggaggcagaggttgcagtaagccaagattatgccactgcactccagcaggggcgacagagcaagactctgcctcaaaaaaaaaattataatgaaaaaatcattctcgttcatatttaaagcacctcaaaatcagattaaatccatctgaaatggctttgtgtatggtatgaggtagggatctaactttacttgttgattctttacaagatcctgattagtgtatttatcttatatcttgccaaatcaaataacttgattatttttctaaatttaattttaagttccaggatacatgtgcaggacatgcaggtttgttacatagctaaacatgtgccagggtggtttgctgcacctatcaacccatcacctaggtattaagccctgcatacattagcgatttatcctgatgctctccctcgcctggcgcctccgacaggccccagtgtgtgttgttcctctgcctctgtccatatgttctcattgttcagtttccacttctaagtgagaacatgtggtgtttggttttctgttcctgtgttaatttgctgaggataatagcttccagcaccatccatgtgtctgcaaaggacacaatctcattcctttgtatggctgcatagtattccacggtgtatatttaccacattttctttatccagtctatcattgatgggaattttggttgactccatgtctttgctattgtgattagtgctgcaatgaacatacacatgcatgtatctttataatagaatgatttatattttttggtatatacccagtaatgggattgctgggtcaaatggtatttctgagaacttgattattagttctaaggtttttctgtaaattctcatgtgtttttttaggtagatgttcatgttgtctacaaaaatgacaatcttatcttttcatttctcacatttataccttatttcaactttctctctggctatctttcctaacaccacaaatgcaatgataattgtggtaatagtgggactctgcctcatttctagctttagagtttcatcattatgaccaatgagtgcctgagtatggctagtgtgaccaagtaacttaattttcagtgttgtttcactgtaattaatttaaacttaaatgggcttggcaaacctggcccatctaaaaataaataaaattgaacttctatctcatctcagactatatacaaaaatacatgccaggcttaaacatacaaaaagaaaagacatgaaagaatttgaagaaaatgtaggaaagaggccagatgtgggggcttatgtctgtaatcctagcaatttgggagcctaaggtgggaggactacctgatcccagaatttcaaaagcagcctgggcagatagggagaccctgtctctacacagaaaagaagagagagagagagaaagaaagaaagaaagagaaagagagagagggagggagggagaaagagaggaaggaaggaaggagggaaggtaggaagggagggaggaaggatggaaggaaggaaggggaagggaagggaaagaaaaagaaagagaaaggaaaggaaggaaggaagaaaaggaggaaaggagggagggaaggaaggaagggagggagggagggagacgatgtggctgtgatggtaactttcttagccaagagaagaaacccagaagctgtggagaaaaagagtggtcataaatgactatgtgaatataaaaaaattttgtatggtaaaatgtaccaaaaacaaaatcagtgcactaaggggtcagggatggtaaatttttcaatatatatggcagataaaagccaagatctatattccagcaagaactcttacaaattgaatttgttttaaaaaagacaaacattccaatagaaaacaagcaaagaatgtgattagagaattcacagaaaagcaaatccaaaaggctaaacatgaaacaactgctcaaattaaccagcggtttgaaaagtgcttatttgagtcaaaataaaatgtcatcttacacctatgaactggaaaaattataacacccttaagctggcatggatctgaggaaatgtgagcacctttaagttggcatgggggtgacgaaaagagtacccttacatgtagaagcaattttggatcatccattagcaatactcccacacattcactttatctcaaaatccacctcctaagaatctaccctattgaaacaaaagcagcactacagaaggtaaatatacaagtaggttaattgttgcattattcgtggcagcaaaactggaaataacgttaatgcccatcaatctgataatggctgagtaactttggtttgccaacaccactgagtacaggacaaatgtttaaaaatcacaacaaattgaacaaagaagcagctaggtaaaatcaatttcccttaagccagatatgaaagagatttgcaaaaaatgtaaagcaatgtcagtctttacattgattttcatttttgaaaatgtaggcatttttctttaaatatattaattgtgttaacaattaacatataacatgcattggggccggatgtggtggctcacgcctataatcccagcactttgggagactgagatgagcagatcgcttgagctcaggagttggagactggcctgggcacatggtgaaactccatctccacgaaaaatttaaaaactagccaggtgtggtggcacacacctgtagtcccagctactagggagtctgaggtaggagaatcgcttgagcccaggatgtggaggctgcaatgagccgagatctcgccactgtactccagcctaggcgacagggtgagactctgtctcaaaagaaaaggtcggggaggggtttatcattgttatttaaaataaatatataaatattttgaaaataattctcattgaatgaagattataagggaactataaatgtaactagaaaaatattagacaattcaatagaaaaattcactaatgatctgagtttataccttagtccattcaggctgctgttaagaaagtagcacaaataaacaaaataccacttcgaaacaagagaaatttatttctcactattctggaggctgggaagtccaagatcaagtcactggcagattaggtgtctggtaagggcccacttcctggtttgtagaaatgaggacttctggctgtgtcctcacatgttgaaggggaactctggggcctttttcttaaaggtcccagtcccattcatgagggctttactctcattgcttcatcacctctgaaatgcctcatctcctaatattatcacattgtgattcaatttcaacatatgagtagagagggacacacacattaatagcagcaaacttcacaaaaagaaaatccgaatgaccacgaattatataaaaggattctgaataatttattatttttaaaacatatggtgaaattagcagtattgcaccaatattcatctcccggttttgaacattatgctgtggttatataagagagtaactttagggaagttcagtgaagggtttgcaggaatttgctgtaccatttttacaacttttcaaaacactaaaattagctcggcataaacagttaaaaatgtggaggagtcaaattttaacattttacattagagtatgggaacaatgatttctcagtacttttagctgttacctttttctctgttcaccttactgcgcagttctggtactaaatagatgctcactttgccagcaaaaggtcctagtgttggctgggtgcggtggctcacacctgtgatcccagcactttgggaggctgaggcaggcagatcacgaggtcaggagtttgagaccagcctggccaatatggtgaaaccctgtctctactaaaaatacaaaaattagccaggcgtggtggcgtgtgcctgtagtcccagctacacaggaggctgaggcagaagaatcgcttgaacccaggaggcggaggttgcagtgagctgagatcatgccacactatactccagcctgggcgacagagcaagactctgactcaaaaaaaaaaaaaaggtcctagttttagtgatgttgccaagttattaaggttccttcctcactaatcgaaactaatacaaggaaaggattacttcctctttgggaaatctggtcaagctgatgatccaatttaattaaaacaataccacaaattgaatctttgtttactgcttgaaaagctactttctagatccttttgtagttcataagtgtgaggactgggttttcaggctcgtgtataagatgtgcctccctcactccttgttacaacatcggcatattactcatctgaatggaaaaaaaaaagcttctgaatagtttcagaagtagatgttaagattcatcttaaagtagtcatataggtcaagaaatgaaacatacacaatatttcagaatcccctgcatgtggcttccccagtaataatccatgcctccctccagaagtcagtaacattctaactttttgataattttgcgctcacttttctttttattgctattagttatgtagttttctttttcttttctttttttttttttgagatggagtttcacttttgttgcccaggctggagtgcaatagtgcgatcttggctcaccgcaatctccgcctcttgggttcaaatgattctcctgcctcagcctcctgagtagctgggattacaggcatgcaccaccatgaccagctaattttgtatttttagtagagaaggggtttctccatgttggtcaggctggtctccaactcctgacctcaggtgatctgcctgccttgtgcctcccaaagttctgggattacaggcatgagccactgtgcccagcataatagttttcttttagctatttttaagattacatatttacatgtatggaacaagattccatgtgttcatttgattttgcaaatttttataatatcacattgatgacaatattctatgtattcatatagctgtatttcattttttcattgctgaatagtattccattatgtggatataccacacttcatcgatccacttgccttgtaagtgggagctaaatgatgagaacacatagaggggaacaacacacactggggcctactggagggtggagggtgggaggagggagaggatcaggaaacataactaacgaatactaggtttaatacttgggtgatgaagtaatctgtataacaaaccaccaggacacaagtttgcctatgcaacaaacctgcacatataccccaaacttaaaataaaagttttaaaaaagtgtattcaagagttgagatttagcacaattaatagcttttactgtttcatcaagtgcaatcttaaatgaagctggaattttccttaacagtgagtgtgaagtgataaagaatacaactttctagcacaatttagtgctattaccttgcttccggctaaggttacagcccttttatgtaccattgcttttgcaccagcaatgtaatgtcaacacagagaaaaacgcaaataacatctgtgtattattactaaaatagttttgaccttgaagatgccccctgaaagaatcttggtatctcctagtagaaccctgtctctagaggatgcatcttagaggaacttctgtatatatgtcagtatgcctgtgtacagatgctccttaacttatggtggagtttcatcctgataaatctgtcataaattgaaaatatagtaagtcagaagtaattttctacttaatattttccatgtatgatgggattatactgaatgtgtactcagtatactgagtactgaatgtgtatggcttttgcactatcgtaaagatgaaaaattataacttgaatcatcataagtcagggatggtctgtatgtaagtgtgtgtatatatctcctacttcagtagataatgctaaaaaattttcccaaacaattgcatgaatttacactcccaaaagtgtacaatatgagagttaccattgccccacatccttgccaacccttggtactttccatttttagcaatctgatgagtatgtaatggtatccactatgacactgattggtttctacctctaaagaggtcgaggaccttttcttatacaattggagttcattggattttcttcttgtaaagtcacttttgaagtgattggccaattttgctattggattgcctgatttttttttctaattggatttgtatattcctcagttgatgagaattgttatggataaaggtagaatttcatcagactcatttccaccttccatgggatggtcatattatgtttttttcttgtatttgagcttgtgataaatacactaaatgagtttctaatgttaaaccacccttgcattcctgacataaacacatcttggctatgatgcattatcatatttatatctagctctatttaatttgcaaactctggcttaatatttgtgccactatatgcctaattaagatttgcctatacttttatttttttatattgttgagtttgggtattaattttataattagccacagaaaatgagcaagagtttgaataggaatagagtaatttcttccttaagttttggtacaatttgctggtatacttaaagtttagccatcttgacctaaagtttgcttggtgagatgatttttactactgattcttccgaatagttttagaactattcaggttttctacttgttttctgaggctattatactaaattacatatttttattaatttatccattaatctaaatgtcaaagtatgtgaaattgttcaaaatattatcgtatattctcaatgtctgcaacatcagtggttatgtcctttatttctgacattagttacatgtgccttctctcttttcattgtatttagactccccagaggtttatcaattttattactttttcaccaaacaagttagggctttgttgattctgttgtatgcattttaaaacatgtattatttagtacttattttattattttcttatgtctactttcttgagtttttttatctcttgagaagaaagatcgaattcagtttatcttatttcaattccagtaatatgattttaagctattcatatctgtcttagtccatttagtcttgctaaaaaagcaatacctgatgctgggtaatttatacagaaaagaggtgtatttggctcacagttctgcaggctgtatagaaagcatggaaccagcatctgcttctggtgaggcctcaggccgcttctactcatggcagaaggtaaaggggagccaccacgtgcaaagatcacatgaggagagagaaagcaagagatagggacagtgcaggtggcaggttctttttaacaaccgctcttgtaagaattaatagagcaagaactcacccattaccaagaggacagtaccaagccattcatgaggcacccactcccataacccaaacatctcccattaggttccatctctaatactggataaaatttcttaattttcttttttttttttttttttttattatactctaagttttagggaacatgtgcacattgtgcaggttagttacatatgtatacatgtgccatgctggtgcgctgcacccactaatgtgtcatctagcattaggtatatctcccaatgctatccctcccccctcccccgaccccaccacagtccccagagtgtgatattccccttcctgtgtccatgtgatctcattgttcaattcccacctatgagtgagaatatgcggtgtttggttttttgttcttgcgatagtttactgagaatgatggtttccaatttcatccatgtccctacaaaggatatgaactcatcattttttatggctgcacagtattccatggtgtatatgtgccacattttcttaatccagtctatcattgttggacatttgggttggttccaagtctttgctattgtgaatagtgccgcaataaacatacgtgtgcatgtgtctttatagcagcatgatttatactcatttgggtatatacccagtaatgggatggctgggtcaaatggtatttctagttctagatccctgaggaatcaccacactgacttccacaatggttgaactagtttacagtcccaccaacagtgtaaaagtgttcctatttctccgcatcctctccagcacctgttgtttcctgactttttaatgattgccattctaactggtgtgagatgatatctcatagtggttttgatttgcatttctctgatggccagtgatgatgagcatttcttcatgtgttttttggctgcataaatgtcttcttttgagaagtgtctgttcatgtccttcgcccactttttgatggggttgtttgtttttttcttgtaaatttgtttgagttcattgtagattctggatattagccctttgtcagatgagtaggttgcgaaaattttctcccatgttgtaggttgcctgttcactctgatggtagtttcttttgctgtgcagaagctctttagtttaattagatcccatttgtcaattttgtcttttgttgccattgcttttggtgttttggacatgaagtccttgcccacgcctatgtcctgagattcaatgccatccccatcaagctaccaatgactttcttcacagaattggaaaaaactactttaaagttcatatggaaccaaaaaagagcccgcattgccaagtcaatcctaagccaaaagaacaaagctggaggcatcacactacctgacttcaaactatactacaaggctacagtaaccaaaacagcatggtactggtaccaaaacagagatatagatcaatggaacagaacagagccctcagaaataatgccgcatatctacaactatctgatctttgacaaacctgagaaaaacaagcaatggggaaaggattccctatttaataaatggtgctgggaaaactggctagccatatgtagaaagctgaaactggatcccttccttacaccttatacaaaaatcaattcaagatggattaaagatttaaacgttaaacctaaaaccataaaaaccctagaagaaaacctaggcataattttcaacctttcaagagttcaataatatttttgtttcagatctccatcttaacaacaaagtgatcagaaaatatactttttgtgatataaatcccttaaactgtgttgagattttctcaatggctcagtctctgatcaagttgtacaaatattctgtgtgtgctttaataatgcatgtattgttgctgttgtgagtgtactgttttgtcttttgtttaagtcaatttgttgatgatgttgtgtagattttcttcatcttcactgacttttttcatgtttaatttactcattaatgaaagagatatgttaaaaaatttcccactatgattatgaatttggacattttctgtagttctgacaactttggatttatatattttgaggctgcattatttagtgcatactaattaggtttttaaatgttctgatgaaattattatcattgtgatatgatcatcattactggtaagtattttgcctaaacactttgcctaaataaattttactttagctgatgtcaatatatctacccaggtttattttggttagtatttgctgcattatatataaattttcatcttttttctttgacattcctgtatcactatgttttagatgtgtctcttgtaaatggcatacagttggatttcttttggcgcagtctagcaaactgattttaactgaagccttacattacacttaatgcaattactaatatatttgaatttaaatctattatttttgtacctgctttgtgttctgcgtttttttttttttgtttttttggttttttttttttttgccttttcaatgattccttttttcctctttctggcctacatttggactgctggagtaatttctattcttcttagttcatttctttcccacaagtttaaaagttttgcactctattgctaagtttattagttattctttaaaaaacatataatacacagttaataaagtctaaagttagtgaccttttaaagcttctccaatataagataggacattagaaccctttactcagtttgcacattccaatatattactattttcttattttacatgtgtcttatacttaagcctcttactcatttttattgttatgattactcaaattattactaatggtgaaataacagagagtgaaggtggagggcaaagcattgggaaattaagtggcactcagtcaccttggtgataaaggttattatgaagactgtgtggcagacaggctgcctctgaccaacttgaagaccaaacaaaaaggaaaagatagctgggcacggtggctcacgcctgcaatcacagcactttgggaggccgaggcgggtggatcacgaggtcaggagttcaagaccagcctgacctacatggtgaaaccccgtctctactaaaaatacaaaatttagccaggtgtggtggcacacacctgtaatcccagctactcaggaggctgaggcaggagaattgcttgtgaaccaggaggcggaggttgcagtgagccaagatcgcaccactgcactccagcctgggcaacagagtgagactccttctcaaaaaaaaaaaaaaaaaaaaaaaaacagataaatgagtccttgcatgcccaacttaagagatatgttagaaacatcagaaagcatctatggctaccttaaaagaatcccttatcttttttaccatgccagctaaatgcacaacccctccagttcccacacactaaacaagaaaataattttaaggccaataaaatacaactgtgggcctcattacccagaagcaggtgacttgatgtattgatgaaatgacctactgaaggcaagttatagtgccatctggcggtgaatatttggtgaggttgggtgaggtgctatcgaacagtatttgccttaaaccagcaccaatatacagtgccatttctcccagagccagaatacacaatgtgaaaaccaagcagtggaggtagtgagaggtgaagccagctgggcttctgggtcgggtgcggacttggagaacttttctgtctagctagaggattgtaaacacaccaatcaccactctgtaaaaacgcactaatcagcattctgtgtctagctaaaggtttgtaaatgcaccaatcagcactctctaaaaacgcaccaatcagcattctgtgtctagctaaaggtttgtaaatgcaccagtcagcactctgtaaaaaacacaccaatcagcgctctgtgtctagctaaaggtttgtaaatgtgccaatcagcactctgtaaaaatgcaccaatcagcactctgtaaaatggaccaatcagtgctctgtaaaatggaccaatcagcaggatgagggtggagccaaagaagggaataaaagctggccacccgtggcaacccggcaaccagctcaggtaccattccaggctgtggtgggtttgttcttttgcctttcacagtaaatcttgctgctgctttctctttggtctgtactacctttatgagctgtaacactctgtgaaggtctgtggcttcattccttaagtcggtgagaccacgaacccaccgggaggaacaaaacaactccagacttgccacttttaagagttgtaacactcactgcgaaggtctgtggcttcactcctgaagtcaagtgagaccacaaacccaccggaagcgagaaactctggacacatctgaacatctgaaggaagaaactctagacacgccatttttaagaactgtaacactcactgcaagagtttgcggcttcattcttgaagtcagcaagcccaagaacccaccggaaggaaccaattctggacacagtagaactggttcctcttccttattccacctaatcacacacctatgcaattttttgcttcctaaatttgcaactttggagtgggtggctttgcgagtcctagtgtttcaaggagaaacacttccactaaaggacccagttatggtttcaagtggaaggagaggctgcctcttggccattttgggcaagtcatgatgctaaaccatcaggcagagaaggaggtacctttactaagctagtaaaggtaccaattgatccaattattaggagaaaaatatgttgttgctatacagtgcaatcaaggagaattaggagtggaaccgagactattccgtcgggaggctttttatactctgtccagaataatggtcaatggataactgcagcagtgcaataaagacgaagcattaatgacttggatcctttgggtcactctaccagataaaaaattccaaggaaacgaagtgctagaggaaggtaagagagacacaaaatggttatcaatttaggctttatgaccagctatagaagcaggaactgcagctattatgttttatggtaactaattgtttctttcccacttcaatttcactctgatatcttacatgaagagcacttttcatggctgttgttacaatttcagtttcagaagtatagcaggaatgacttccctctgcagtaatagtagaactaatactgggcatctctgtgttaaggatgtgagcttgttcatccaaacaaaagaacgtaatgggtgctcagtgacaacagggatgacctgtgcctcttcagatccatcattcacttgtctctgctcatttctgtgcactgacaggctgacctctcaggaccgcatcatcagcttccccttgccagtgggaggcactgtccggagattgaagggtgggaggaaagaagtcagggtttttattcctcctgttctctccctacagttctggccgtggctgcattcctctgtgctacaagtcctataaggcagcccatcctccaaggctactgcccttgccccatcaggtctaggctggtacccgtttcccactgctgcttgtccttggatgctgcaccatctctttttggacctcttaatcctgcctacatctctatttagtcccttcattggcctatgtttattatttatttattcatttatttatttattttgagacggagtcttgctctgtcacccaggctggagtgcagtgacgcgatctcgactcactgcaacctccatctcccgggttcaagcaattctcctgcctcagcctcctgagtagctgggactacaggcgtaagccaccgctcctggccactttttgtatttttagtagagacagagtttcaccatgttggccaggctggtctggaactcctgatctcaagtgatccgcctgccttggcctcccaaagtgctaggattacagacgtgagccaccgtgtccggccaagtctatgtttaattaagctcttgaatgagccatcagcttcctattcgaatcctgatggatacatccatatatttaccacctgtttcctcctcgtacctcagaccttctacctgggatcattttcattctatgatcaaagtacatccatgaaggagggtttcagtttgcttttaccatatgccatagtaccagtttggtgccacttttacttttgttcctttcctctcaggagactgttgaaaactacagctcatttttataatcagaataagcctatgctcatcagtcaaaagcaggtttgaatgctctgcttagttcttggagttctcactttctaaattttagctaggaaattcctcactagattgtctttccattattttataaagattgttttgagtattttatccgccacttttaatgactttcagcagaggagttgatccatatagcctggactgccattctcaaaaatgagaaagttctcccctctcttaggtttttttgttttcccataagatttttgcatttgcttgctatttcacgtaggctgttgggaagaatgtctcctgaaatcttggatgagaaatatgacaatagagaaagacaattcactttcaagatatcaaaatactattcatataacagaaaaacaaaaaagtattaatattagccatctattgttacctagggaattattccaaaactgagcatcttgatacacacttatcttacagtttctgtggtcaggaatctgagcacagcttagcttggtccttggcttacggtttctcactaggttgaaatcaagatgttgactcagggtcttcatcctcatctgaaggctctactggggaatgacccacttccaagtttattcattggcttttggcaacatgcagttcctcacagggtattggaatgagagcctcagttcctttctagctgttggcaggggcttccctcagttccttacctcatgagtctttcaaaaatggcagctcagaatatagccacttacttgattaatacatgaaaatcagaaaggcagtagagtttgctagcaagacagaagtcacacagttttttgtaatctaatattggaaatgacattccatcacttttgccatataccattagttataagtaagtcactaagttcatcctttggggaggaggttacacaaacacatgaatatcaggaagtggagatcattgggagatattttagaaggctgacaaccccgcaaaaataatttctgaatttccatctgtatctcagcattcaatagctatgcacctgtttcagcacattggcaggagcaaaacaatagcaaagtgtttacagcatgtatcgtgtgaaatacatccactctcaaagcaccttcgtttggctatttcttcagtaggttcatcaaataaaccactttttttcaagcaactctcagttatcagtacgtcctgctgggtgggtattgtcatctgcagagtacagtatcggctttttgtttaagtattgctttgaacatggaagagctgctttgtcatcctgtttaaaaacctcataggcatgcaattccaaggtctcttgtatgtcatgagtttgattttgactgaagaatgatgaaagtgtggcccaaccatctttctgcttatggacattaattctattacctgatactgagctctgattattcctggacacacaattaaaggtgtgaagaaataataatatacttctaatttctaattcactcatagcctttgccatttttgttccattatcaacaattgacttttttcatatgacatacattccataaagtatatgcactatgttgttaactacgtgtaagaccaagaaatatctccaccaccaagtagaaatatagtgaaattcatcataaatcaggaagaaaacacctgattgtttctctatgtccaaatgttcaatctataagatacagaattagtacataaaataattttgtgcacagcttaatgtaatttggaataacttttcaaaacatgttttctagaaagaacttttaagaatcataattttagcaaattttgaaaatcctttgtcttctacttcaaaaaatggttgacagtgttgtgcaatcaattttacagctttaagattttagcttcactaactcaaaactataaagaatttttttaaagtgtgcttataaaatctgttgttttgaagtttgattagtgagaacaaaatgtatttggggaatctgatttccaacacttttctgttttttttttttcatgctctttgcacccattatgatgtctggatcaaagacgatttagcacagaagttgttacacatgattttagagagtttcatttctacttcaagaaatttaagtaagcaaaattgccaatctttttgaaattcatcctcacaaatgtgaacaattttcagataacactttttctaaaaagatacacagcctaaatgtaaataactaaaaaacatcaaatacggtcatcaaagattattttcgttaataatatgaatgatagaataccaaaaaattctacaagggaggctgcctatcacaaaaatgatctctggatttccatggaatctaatctttgctgttctgactcatgttattattgatatttttacaatcactttccagttccaagaggagacaatattctttctaatggcatttaactaaagcactcttaatcttcataccaacactcagtctatttcctgagttgtataattatgcggaagttctcagtaattgtttttggacctgaaaggcatggtgtaatgatagagtgcccccaggactgaagcactggttcatcccagctgctgtgagtgttgattgctgacagctggcagcactcccttgtaaggattgccttcagagcaaggagctgcctcacccaaagtcacaaccccttcctgggtcagctcacatccaatgactgctctattaaatcagcattgtttatgctggaggccatgagcctgtttatgctggaggccatgagcctgaggttttctccatactttgagttcctacctaataaatagcaacctaagtcagtaggtaaacaaaccgaaatgtaacttagtagtatactttttgtaacaaatagcaaggttccagccaatcacaaacagccaagcttcaaccaatcacaggcagctaactgatcatatccgtgcccaaataaggcaaatgtcttgctgtagccaaccagatgatttctctactttgcttctgtgttcagcttatacaagctcactgctcttctgattctgagtgttgccctactcatgaattgttctctactcaaataaactgtgttcaatttaatttgtctgaagttcttcttttaataggtcagtgaatggtataaaggcccagtcccctttccccgattcaggacatctctgtggagccatctagctgtagagtttcctgtaggattggctggggcttctgttatgactgcatagtagttcaccttctcccactgcctaatcctacttccttcgctcccctacgagtgtgaatcctgagagcaggaaattaataggggtgttctcaggattcacacttgtaggggagttctaacctctgcttcagagtcagtttcctgaagaatcatctgtaacttataggttttcacaatcaccattatttatttcagcctcttactcctgtaattgtataattacacacacatttatactttgataaaaatttaactttgaacacacacacgatgttcactccaagctacattagaatgcttaaatttgaaggtgactattaagattttaaagttaggaacatgatttgttcatatttctaatgttattgtgctagttagataggctggtaacccaatctgtcatgtattcatcgtgaccacacaagttcagggatgccagaaatgaacttcaaattggcactcagtggttccacctccaaaagactgaggtgagatcaaagtcaaatagaaaaaaatgaacaaatattgaggctgaagctgaattttaatgcaacccaactatgtgcatgtttgtgtgtgtatgtatgtttacttaaacatgaagtaaagaatgacaagacacacagataaacatggatactatattggttttctagggctgttgtaataaagtattataaactgagcagcttaaaacaacagaaattatccgggcacagtgtatcatgcctgtaatcccagtactttgggagactgagggcgggcagatcacttgaggtcaggcgtttgagaccagcctagccaacatggtaagatcctgtctctactaaaaatacgaaaattagccaggcatggtggcaggtgactgtagtcccagctacttgggaggctgaggcaggagactcacttgagcccaggaggtggagactgcagtgagccaagatcatgccactgcactccagcctgggtggcagagggagactccacctcaaaacaaacaagcaaaaacagaaatgtattctctcgcagatgtggaggctagaagttagaaatgaaggtatcagcaggaccagcttcctctgtaggccccttggtttcttgttctagcttctggtggttgccagtcatccttggtgtttcttggcttgtagatgcatcacttgaatctctctgcctccatcatcacatggccttcttcccaagtattttatctgcatcttcaaatatctctctccttatcagattaccagtcattggatttagggcccactctaatccagtatgccttcattttaacttgattacatctgtaaaggctctcaaagaaggtcacattcacaggtacaggggattcaaactttaacatatatatttggtggggtggggacacaatttaactcacaacaggtatgacagataactttgggaggagaagcacctggtgaatgggtaggaagggaggggtcaatcaaggtaaccaaagaaaaaaataaatgaggatgggaaagaatacagtaaaaataccttcataagaataaattgccctgttaatataaaattctgtgcatgtgtatgaataaattagaataaagagctagctctgtattaatttgtaggcataacattcgataattcttttatatggtttattgtgtgccaggcactgttttaagcactttccatacattaactcctttaatccttatgtctcaacccatgatataggtactattattattacacccattttactgatgatgaaactgagacatagagagacatagctagtaaaatggctgagccaggattcaaacctgagccatcgggcttcagaatctgtgctcttaatcaccttggcatatgtagtatgactctgttcttcagaaactaaaacaatatatatgtgtacaaatgcatatgtatacatttatattttagaagacataaaattaaagtatcaagatcaaaaataaaatcttggattctaaccagctctgtcagggctcacagacaatgaatgataaatattctggttggcctattttgtgtcatatacccagatgcccagactaggtttttttggggggagaaggaggggcatcagtgcttggacattcttgtcagagtcatgtggagtgggttacttaaaggaaagagatgatctattatcagaggtaggaggagatggcagctgacggacttgcaaaaactataactagtctgtctccttgaacctcagtgtaaccttccctacctttttcttagatgtaaacagcagagcagctgaaggtccttcactcatcaaacaaaaagaaggtatggcccaaggtgaagagaaaggctatagggaaaccctccccaaaacatcacacccattttcccatgccctttgttcagaaaataattaattgtggaaatgagatctgttgcctccccacttcccccagcccagacccgacaacaatggggaccctgtctctacttcctacaagtccaccaggggcaaattaccatttggggttatttaatggtgtaataggagaatctgctgcttttagttcaggggtgtccaatctttcagcttccctgggccaaactggaagaattgtcttgggctgcacataaaatacattaacactaatgatagctgatgagcttaaaaaaatttgcaaaaaaaacccaaaacctcaatgttttaagaaagtttatgaatgtgtgttgggccacattcaaagccatcctgggccacatgaggcccatgggctgtgggttggacaagcttgatttagatcatctcgtgattttaggctctgccagtgtggggattatcccacctgcagggattatgtggtgctctaggattatcttgggtttggggttgatccccccacatggaaggattgtctggtggtgctatcggattatcttggttttagggttgatccctcacatggaaggattctctgctactttgatgttcctcatgacccggtgccgcctgttctatagtatcaacgtgtaagtccttgactcagacctaattcaaggtaggttaaggtgtcctcctgtctaccagttcctgtttcaggaacttgggatgaccttgtgaagggtaggaagtttctattttcctttgaagtgctgttccaagaggtaataatagtggaacttgagtttcagcagttgatgagaatggtggcccctgtgtctaagaagtatgagaattacaatattgggtagcagagactgataaagatggtgatataggttgagcatcccttatccaaaatacttgagacagaaagtgtttcaggtttgatttttttattttgtattttggactattttcatatatataaaatcagatatttggggatgagacccaagtccaaacacaaaattcatttgttttcatttcatttatatatgccttctacacatagcctgaagataattttatacaatatttttgtgcatgaaacaaggttttttgtttgttttaagacagggtctcactctatcaaccaggctggagtgcagcctcaacttcctgggcttaagcaatcctcccacctcagcctccctagtagctgggagaagaagcatgcatcaccatgccctgctaagttttaaatttttttattgtagagatgggaatcccactatgttgcccaggctggtctcaaattcctgggctcaagtgatcctcctgccttagcctcccaaacagctggattacaggcataagccactgtgcccagccccatgaaacaaagttttgactgcaatctatcacatgagatcaagtgatggaatgaaatttttcacttctgacgttacgtcggtgctcaaaaagtttttgattttggagcatttcagattcgagatttttgcattaaggatgctcaacctgtacttgtgtgccaatgtctgatgggaatggtggccccctgtttcagggagtgaaggcaatgatggatcctgagttctggatatttgtaggaattgcagtagatgagtcttatgtgctgagagatttggagccctgtatttcagagaatgaaggaaccagtggtccctgtgacttgctaactgatgagaacagaacagaggccttatgtttcagaaactaatgggaattatggtcactgttcctggggggcttaagcaagtcccagcctaatccacaagtcatttattattcactcatctcctcattcattcacttagcaaacattttcctgagcccctgctctgagccatgcctgggtggagtgatattgaggacacagaaatgactcagacccagactgtgccctcagtaaattcccaaagacagacccagacgtagaaaatcacaacacaacaggatcagggccaggacaaggactgtgatgtggtgcctgtcctgatctgtctacagggcatccagggtgaatgtagaatgacagtaactctagatcgtaagtgaaagtgaggggtctgacaaagggtccttcttaatcatacatgaatttgtgtgcatgacaagtttaaatgtacccagtgtcaatccttagaaatagcatattttcccagagcaagcccaccccaaagaaggagccagagaggcctgggtttgaatctctagctccatcacatactttgtgagcttgggcaactcgctattcagaactgcatcctattcagtattccatccttacaattgggataataatagtttctaataataaggtttctgtgtaatcaatgatataatgtataacaaatactcatcccaggaactggctccaagtagtcattcaataaagggtatctgttgtcattattattatcccattgttagtaattatcaacaaattttaaaggatctagaagtaagcatttatcgaatatctgggtttagaggcttaaaagcattggacaaaatcactttaaaaatcagcaaatttgggccaggtgtggtggctcagccaaggtgggaggatcacttgaggtcagaagttcaagaccagtccagcaaacgtggcaaaaccccatctctacagaatacacaaaaattagccgggcctggtggcgcaggcctgtagttccaaccacgtgggaggctgaggtgggagaatggcttgaacctggaaggcagaggttgcagtgatctgagataatgccactgcactccagcctgggcaatccgtctcaaaaataaatacatacatacatacatacatacatacatacatacatacatacataagcaaatctgtaaatatcaatatgcataaccattagtttcttgacataaaaaacctcccaatctcccaattaactgaatacactaggaataaatagatgaatacaatggaatattatatcactattaaaatgaatgaggaggttctataagcctagatatgggaggatctttggatatcatgtaaaaaaaaaaaaaaaaaccaaggtgcagaataatgtgatcctatcaggggacagaaaagaggagggtggtatatatgtgcatagatgtataaaattcctctggaaagatacataagaaattagtgaatatatgctgtccccagagaggagaactgggtggctggaggatagggagggagggagatgcactgttgaaagcccagcaccatgcatcctgaacgttttccctggctcttaatgtccactaagttctcagatgcccacagcatctctctcctctaccctcttcttcctcctagttccccattgaaagcaactcctgccccatccgttcctgggccagactcagggagttgtagttttcctacctgtttcccgcccacaggttcctgttctctgcccccagtgcccagcagtctccagccatctccagctcctcacattcctgccccaccccttcctctctccccaggtcctagcccgcaaactgcagggagggggcctcctccccagcctccacccgtctctccccctccactccacacagcctcagcggggtctgacattcagctataaccgtgtccccgccccttgctcacaaccttccagggctccctgtcaccctcagaaggctaagttcccagcctggcctgaaactccctaagaatctgaccccgcccgctcgccccaccagcctcatctcctgtgctccttggctcctggcttcggaggctctagtcagacttaagggctttgttgtcctcccagcacctccttggtttcctgccttgggccttcgcttcagctgtgccctctgcctggaagggccttagtggaggtcatgccacaaccacgccttctctggaggtcctctctgccgtctccagctgccaggattcctcccgccctgggctctcacagcctctggcctctccctgtgtcatacccagatcacccgggattgggactgtctgcggctggctctgtctcttccatcagactgtgagctccatctgcaagggcagattcgggtctgattcacctttgagcccccagtgggtgggggtggggggtggagatactaaagctggtgggggcgaagctgggagagcaggaagggggagagagagacgggcagaccctgactggttcggggagagaggggaggagaaagcgagagagaggaagaacagagacacagagacaggaagggagggagagaaacagagaaaagggaagaataaatgggagacacagataatgccccacaggcagagaaagaggatggagatagggagagggcgaaaggaaggacagatgtgcagagacagaagggaggacagacggaaagagacacagagaggcagcaaaagcaaccaagaatgacaggagcagagaggaggagggaaagagggagagagagagagagagaacgagagagaagggagggagggagagagggagagagagagcgagagagcacgcacagagcgaggaggaggcgcaggagagaagagggagggaggccagcgagggacaggacggggcggagaggcggaggggagctagggaaagccggggaggagcgagactggccgaggaggagggcgggcgagcgggagcgccggccccgccgcctcccggcctcttttgtcccttccctcctctgcgtcaggcttctctggcccggcctccccctcccgctccctcctcctccccggggctggatggaattttttcccctggacctgggccagctccggggcaggggggaagccaggccggactgggctgggcggtggggaggggccggggcggggggccccctggggagggggctggtccgacggccgcgcagccggcggggtccagggagggggagccccggaccgcagagccggggaggaggtgacggccggagggagtcggggagaagggaaggaggatggcggggacggcgggaggaaggggagaggccgccgtgcggcgaaggcggggagaggatggagagcgctcggcggcggtggggcccggcctgcgggcccggggcggcggagaagaccccttccctgcgacgcgggagccgcgggagccgtgagtctgcggaaagggagggtggggggctggggcccgcactcctgggtccctgagggaggagcacccgggggcctggatttcagggttcttggaggaggagttgggggtggggagggtggggtggctgggagcccagactcctgaatccttgaaggagggggctgggacctggatcccggggtccagaatctggagaaggctggggacacttcctggattcaagagggaggacagagatgggggctggggctggtaggatcgtggctggaagagactaggggcgagctgcccgagccctcgggggaggtggaggaagactggctttggagtgcctgcggcagcggaagggttaacgtctggctggaggggagggggaggcgcagggatggggctgcggggctttgaggggtcaagggtgagccgtgccagtgggagggggccgaggaggagggggaggttgtctgggctgccagacaggccagggtcagcggcgggggcaggagatgtctggaggaggagaggcccagcatccatgctccctcggggacccgggattccaggtcccagacccctcctccctcagatctgggagtacaccacccagtcccccacccattccagaatccgagcccccagcccccttttttccaggatccaggagtctgagcccccagtctgttctctcagaccagggaatccacactccagcccctaactccttcaaaaccccagagttcagaacctcagcccctcttcccaaggagcgcggcccccaaccctctgttcctctagaacccaagcgttcaggctccggcatctttctccctttgaagcctgcagttctggggatccccaggcccctcctcctccggaacccaggagtccccacctcctctttagccccagctggagtccagccctccaggggttaagggggcgggaccagctagttgccatggtgccagactgtttgggtctgctctctgacccttgggggctccccagggtccgcagagagggggagggggacctaggcctgggggaagtccagagcctaccccttccccaaagcggggctatgggcccagggagttcgcgtttccaccaacgccttgtccagtgaccttgaacaagtcctgacccttctctctccgcctcagtttccccaaggagacactggttggcgggtgggggagatgcttaggtccggggaatctctgagattctcggcttcccctctcccctcaccctcctcctcaggccccaggcagccccggggcatgctgggaacccaggcctgggctccgggccaggttggtgtgggggggtgggggcgggggcagcctcctcccttccccttcctccccaccttggcctgactctcgcccccgcctgagggtctgggaggttgggaaggagggaagggggaagagagctggccgtagacccgtctccggcccccgcctccccctttcctcctccgcccctttcccgcctctcctccccctcctcaggtcgctaccccagccctgggccccttctcaaaccacccccaccccacccccagctccagacctggctcgagctgcgagggggagggagagagggaaggagaaaagagagagagagaagggagggagacccaaagagagaagggggaggggaggaaagagagagacctaagagggagggaaggagagagagagggagagagacagagactgagagagagcaggagacggaggtgagggatggagagagggaaggggcggagggagaggaagtgaggaaagacatccgaaaaaagggggtggagaagggtgagaaagaggagagagactgagagagggccagagagagaatgagagagacaaagagggggaagggggagaaggggaggatgaaagacagaaggtagaggaaaagcaggagaaagagggggagagaaggaagaaaacagaagcggggagaggagagaggcgatgggcagagagagaagccagcgcagagccagggagggatgtcctgatgcaggaggaggctgggaaccagggaaggtggaaagaaagagggagagagaaaaaggcagggccagagagacctggactgcgagaaaggaaccggaaggtgcgcctggagcaggggcagcgagaaccagacagtccaggaggaggggctgggcacgggagagaccccagctggaggggctcagagcccaggggtggggagggtgggtgctgggtcccggggtccagaagctggagaaggctggggacacctcctggattcaagagggaggacagagatggggctgggcagactttgggagcctcttcccctctctgaggctcagccccctcacctgccaaatggggatgctgagggcacctcgctctctggagtgggaggtgtcagggagaggactggtgctcagggcctggtatggggtcagcgctgggagattgtggctgtcatagttgtaaatgacccaaagaagggaggagagaggaaagaaagcacctagggaggctctgatggttggctagcccctggcctccttagccctgggcctggagtctctgcagactgacaggagggtaggtaggaagcaggtgtgcccaaagggccaaattacgagacaaatgaggttccctcccagccggcacccaggaagccaggttttctatcaggccatgccttccccaggaggcctgcctggccggagggaggaggggctgggggcagggactcctgggtctctggggagaaggaggctttggatctggactcatgagtctgagggaggaaggggctgagtccttggattccaggaacatttggggagaaaagggccagaggcctggattcctgggtctgtggtgaggaagggcctagacttctgggttctttagggaggagggggatgagagccttgactccagggtccctgatgaggaaggggctgagggcctggactcctgggttccttggggaggaggggccgggggcccggactcctgggtcctggcacccacccgtagaaccgaccttgcggggccttcgccgcacacaagctcgtgtctgtgggtccgtgtcgggggctcaccatcgcggctggggcctccccggccctccccctcatccctggtcctcctggtccctgtctgtctgtctgtcgggtctgtccacctgccgcgccccccgggctgaggtaggaggttgtatagttgaggaggacacccaaggagatcactatacggcctcctagctttccccaggctgcgccctgcacgggacggggcccggcggggacccccagccccactcagggacccttagccccactgggctgccccagggaccctgggaggaagagccgggctcttttctgtccttgtccctgcatcccctccttcccctgaaatctgttttccttccctgtctgtctccatctctgctgtgtctctgtggcttctgtgtctctttcacagtggatcctctgactccctcttattctggctttctaggtctctgcccctcccgatatctctctgtgtctctatttctgtcgtttttggtctttctgtctctggctctcagaatgtctctgtgcctatctccatctctgacccccaccccagggtctaccgggccaccgcacaccatgttgccagtctctaggtccctgagaccctttaacctgtgaggacatccagggtcacaggtgaggttcttgggagcctggcgtctggcccaaccacacacctggggaattgctggcctgacttctgacccctgactcctcatacccttcctccagagcatgacatttgaccaccaactgaaacctgacctctgaccccagaccactggcccttcccccgccctgtggtgacttcataaaggttactagcttctcccctggccttgagacccacacgatggccctgctggctctggccagtgccgtcccgtctgccctgctggccctggctgtcttcagggtgcccgcctgggcctgtctcctctgcttcacaacctactctgagcgcctccgcatctgccagatgtttgttgggatgcggagccccaagcttgaagagtgtgaggaggccttcacggccgccttccagggcctctctgacaccgaaatcagtgaggagaccatccacacttcatcagtgtcctggggaaggtgcagagggagggcaggagaggcccagagggtcaggctgagggacagacagagagaaacagtcagaggagaaaggctcaaagaccatgagaacaacagagacttagggacagagagacacagacaggggaagacagcagggcaaagactcagagaggggaggatggagagtcagagaggggaagatggagactcagagagggggaggatggagactcagagagagaggaagatggagactcggaaagatggagactcaggagtatggagagtcagagaggggaggatggacactcgggaggatggagagtcaggaggatggagactcatagaaaggggaggatggagagtcaggagaggttggagactggagagggaatagagacccagagaggggaggatggagactcagagggtggaagatggagactcaaagaggatggaaacccagagagaggaggacagagatgaggcagagactaggggaagcaggatagcgactggtcgggggcagagactcagggaggatagagacttgggagggactcaggaagcatagcgactgtggggcaaagagtcagagaggggaggatacagacttgggagggcagagactcagaaacagaatgttcgcattagggacatggtgttgcggggagctgcctcccccagcccctgctccctccctcaccgccagactatgatgagagaagccacctgcatgacaccttcacccagatgacccatgccctgcaggagctggctgctgcccagggtgagtgtgtggggatggggagatgggagatgtggacttggagcccctaagaaatgggtatgtgggagggcccagggcagaggaaggaggcccccagagttgggcagtgatccgggaggggaaagctgggaagacattgagctcagctacttgtccaaacgaaggctgaaggcagctctaagagccaggggctgaaggtggtgagggggaagggacgctgcagaaattgcctagagctggaagtccagatggggtcgggtaggcataggttctgccatggctgcatggctcacactcttactggctatgaagttctgggtgtgtcactgcccctctcctggcctcaacttacccatctgtaaagtgggacaatcttcttgcctcctaggatggccatggagctcagtgcaggggttggggctgcctgatgagcctgatcttagggaaggcatcttcctctaggatagaacacacacacactcgcacacagacacgctcagagacatacactcacactcacacacacacacagatttcttataaagtgattccacatttttgaggtgtgaggcaattagagggcgggaaaacaggaacagcagagtggatcactcaggtgacagcagtgaaaagagacaaggtgtgactgtcctggtgagacaggcacatgtgacagccttgaggtgtgtggctgtgcgaagagacctcagggctgggggccacgcaatgccgatgggcagcatgggcggtaatcatgcctgatcaccatggccatgatccccacgaggtgccagaccctggaactgtggaggctcggagttgcaggagttacagagccctgcgctatagaataaactggcttcctcttaggtccaggagctcagggcttattcccacacccacagtcgctccttttgcttcctgctttgccctccaagcgtcctgtcaacaatcccggaagagggaaggttcccatccacccagggggcatccagggccagcctggagaaggcctcagctgtggctctccccatctccaccctaaagggagacctgaggccctaaacctctccatgtgggggtgtgcaggattccaagaaatgccctttctccccacataggctgccttgttacagaagcttttgaaaagatgaggaacctttggatctgggaatggaagccttctgtggggccgcatgggggacaaacttggaggggagagagaagaggctgggtgagggtccaggccagagcggaggcccgagtgggggctggggccgtgaaggtggagaagggccagggccagagagttaggtctgctgggctgttttgggaagcatagagaacagcatctgagacaggtcctgctctgtgcctgttgggcggtgggtcatcaccgaaataaggagcctgagagaaagagccgggggcagatgataagctgggttagaaggcagtgactttgaggggtcccagggacgtttaggaggcagctagatacctaggtgcagagttcagcagaaaagtcagagagtgttgagtctctttcctcagggcgctggggagctgcagcaggagtgtgagcagtgaagaagtaggggcagctctgggtgtagaaagaaccctctggggtcgtgtcaaagatggaccagagggagagtctggaggccgggagaagctggtgcaatacgttcaattatacttactgaatgtgccaggaacaaccgctgtgaccaaaactgcaaaccacctgtcctcgggttgcttatattggggtggagtctggggagatagacaataaacataatcgataaaatatcttagtatcttagtatgtcagttggtgatccctgccatggaggaaaacagagaaggggaagagaaaggggtgatagtttttttgtttttttgagatagggtctcactttgtcacccaggctggattgcagtgatgtgattatacctcactacagcttcaaactcctgggctcaagcgatcttcctgcctcagcctcccaagtagctgggactataggtgtgcgccaccatctttggctaattttttaaatagtttgtaatgatggtgtcttgttatgttgcatgggttggtcttgaactcctgggctcaagtgatcttcccacctcagcctcccaaagtgctgggattacaggcatgaactaccgtacctggctgggtgataattttaaataggttggtcagggcaggtggaaatgacagggtccagttgagcaaagacctgagcaaggtgacagtgacagcgacagccatgcagataatctgtggaaagagattttcaggccacagggaatagccagtgcaagaccctggggcccgtggggctggagtaaaggtgaaatcagagagatagcaaggggccacctcctgtagatcctcatagacagggggttctcaagccccagcatacatcagaatcccctgggagcttatttaaaatgcagatttctgggcttcaccacctctgaccaggaggtccaaggtagggcccagacatggacgtttctgtcaagatcccagggaatgctgatgctgctgctccgggaacactctttgagaatcactgttgtaggcccttggaatgacttttgttttttgctcttgaaatgggggagctgttggaggactttacacagagagacaggatctgacctgggatttaacaagatctctctggcagctgtatggggcctggacaaaggcaggaagacttccagtgagaagccggcccatggtggcttggaccagtcacagtggtccgggggcccagatgaggtctgagcagagtggggtgggcataaggatttgaccgtgtgccaggcttgcccatgcgtgcaaaaggctgtgtttgccatacacagagtcattcatattaagtatcttcctaaaggatatcctctaccggccctgtgaggctgggttttatagccccgcttatcagaagggaacgctgggctcttctggacaagaacagtaggcccaggatatatttggagatagactggaccagatgtaggtgggtgagggcaatgggaagaatcaaggatgacttttgcgtctcctccagagggagcagcagggagatggaggagctgatgtaggctgactgcctcttggtgatcccaggtgatcttatttgtatatatgtatatataaaccatggagtagatgacgtggtacagactggatgcagtattaggtgtggagattatgtatgcagcgattaggtgtggaggctctggagcctgaccaccagggtcaaatgtagccatgtgattttggaccacttctctaatctccccatgcctccgtttccccacctcaaacttggagatggcaatcctaagtttgccagccttctctaacactcactacgtgctaggagccattctacacacttagtgacaccatctcatacaatcattaaacgatgccatggaagagtggggatgaggatgctttcatggttgtatggcgtctcatcctcccgctaattctgtgatacagacactgctgtcatcctcatttgatgaatgaggaaactgaggatcaggaaggtgaagtcacttggccaaggtcgcatggggaggagggcttgtgattgatactcagatctgagacaggtgtgctcaagacggaagcaccaggactcagacccagatgatctgaaccagggtcagagctcctgacgatatgcaactcctctgggggagactttacaacacccacccatgccgccttatggcccgcttgctataacccaggccacttggcctgttcggaacatttcactccacttatactcccctggtggagtataagcccacccggccaccatggcttacttggtatatcccacgctcaccctgcccatgagtcatttgatttggcacatagaaattctttggatgactcctccaacatcctggcctctcatttgtgcaccccagtctgaccacatgctcctgatcatcctgccatcttgagaccacactcctgctctgtggccaaggagagaccactgggtcctcatttggaacccacttctgggcatcagtgcttcctctctccaagtgtatatccagtgatcattgttttaggcactttcttgccaatatcctcagttccctccctttttgtatggctttaatcacagaggacgctttcccctgtccctgcaatggctttaagcccgtaggaagtttagctctcctatataaagtaagtcttgtggtaggcacttaaggctaatatggcacctccatttcttggggatccaagctccttcaagacttaatatcccagggagtagcccttgtcctcatggtcccgtgtggctgctagagctccaaccatcaaaacaaattttcaggcagcaggatggatgaggggaacaataagatggcaccaccttctctgtctttgttttttagagacagggtcttgctctattgcccaggctgggtggagggcagtggtgcaatcatagctcactacagccttgaactcctgggctcaaccatcctcccacttcagcttcctgagtagctaagactacaagcacaccatcacacctggctaatttataaaaatttgtttagagatggtgtctggatatgttgcccaggcttgtctcgaactcctggcctcaagtgatcctgtcacctcagcctcccgagtagctgtgattccaggtgcggtaccacctcccttttaaggccacctcctgtgactcacataacacatccatttgcatcctatggctacaacttggtcacatgaccacaactgcaaggaaggctgggagatgaagctttttatctgtgttctgtggatataggttatagatatataggtatttggaggcagtgaacaattcctgtgtgttggtttgctaggaccactgtaacaaagtaccgtagactgggtgactcgaacaacagaagtttctgccttctagaagtctgagaccaaggttttggtgtcagcagggttagtttcttctcacgcctctctctttggcttgtagatgccttccttcatatgtccctgtgtgcatctctgtgtcctaatttcctcttctcataaggacaccaatcatactgcattacagcccaccctaatgacctcattttaacttaatcacctctttaagaaccaagtacagtcacattctgaggtactgggagttaggacttcaacatacaagtttggttgcgggggatggggggtgggcggcacgatttagccgataaaaccctgccacattactgatttccacaaatcaccacgagatcaagtcagctgtctattcttattccactggaacaagccacaaacccatacaatttggaggccattgcagtggtcaaaacacaaggccaggcatggtggcccacacctgtaatcccagcactttgggaggccgaggcaggcggatcacctgaggttaggagtttgagaccagcctggccaacatggtgaaaccccatctctactaaaaatataaaaattcgccgagcatggtggtgggtgcctgtaatcctagctactggggaggctgaggcaggagaatcacttgaacctgggaggtggaagttgcagtgagccaagatcacaccactgtacgccagcctgggcaacagagcgagactctatctcaaaacaaaacaaacacctacaaagacaaggaacataaaagagtaaaagatgggtaaatatagaagtgaatagaggctggggactatggagaagtggccggtgtgtgccccatttcaagggagtgactgctacccatctccagctaattgctgccttatggaaatgcgatctctgtgttacagctcttccaactttgtaaaaaagagatgccaaacgttttatttgacattccaaattttatatgttggcaactggttcattttcttttaaacactttccaggccaaatataacacatcccagggatggatttgggtcataggccaccagctggggtctccagttcaagttggatcctggaattcattgtacaaatacttactgagcacttctaagactgagggccctctccaggatccagaggacacagtgctacagaagaacatgtttatttacttacgagacagacataagtgatcatcatctatatataaatatatgtaattgcagacagatgagagctaggaatgaaatgattgcgatgagagacaaaaacagggaacttggttagatttgtggtgatggaaggatgattaggagaaggaaaaatgtgctaaaaacaagccagcatgtgcaaaggccctgaggtgctagggaatgtggtggttttcatattaaaggaaatgaggccaggcacggtggctcatgcctgtaaccccagcactttgggaggctgaggtgggtggatcacttgaggtcaggagttcgagaccagcctggccaacatggtgaaaccccatctctactaaaaacacaaaaattagccaggcgtggtggtgcacacctgcagtccctgctactcgggaggctagggcaggagaatcacttgaacccaggaggcggaggttgcggtgagccgagatcgcaccactgcactccagcctgggtgacagtgagacactgtctgaataaaataaaataaaggaaatgaaaggtgggcagtagggatgggacagggagggagggggaactaggccaaaccatgtaagacctaataggccttggtgaggaatttgatctttatcctccccttctccccccaacaagctacatgcaggtgatgtccaggaggacttccatcctggagagattcaggaggcagaagaaaggagacttagggacttgttagccttcaactacagagggcgggtgatgagaagaggagcagagaatatggtaatgagaggggtgaagaggggccagggaagggcagataccatgacagtacgtcctgtgagctagggccagcctagccctagccaggctagatcagaatgcaggaccaaggaccaagccctgggggaagggctttactacacaggccgtcctcccctccactctccaggatcctttgaggttgccttccctgatgctgcggagaaaatgaagaaggtcattacacagcttaaagaaggtaaaatacactccatctctccttccccagacacacacacacacaattagaaaaccccacttttggccggggatggtggctcacgcctgtaatcccagcactttggaaggctgaggcgggcagatcacttgagatcaggagttcaaaagcagtctgaccaacatggtgatacccatatctactaaagatactaaaattagctgggcgtggtaacgcatgcttgtaatctcatctactcaggaggctgaggcaggaaaattgcttgaaccctggaggcggggttgcagtgacccgagatcggcactccagcctgggtgacagagcaagactccatctcaaaacgaaacccactcctgagaccccccatccactccccgtacaatcccctggccccatctctgagcctcagaccttgagggacgactatttccccgcgtggaccatttttgatctggccccgccccttcgatgaaaggtttcgtctccaactgagcccctttccgggactactactaacctggccacgcctcttctctaactgggccaccaccttagccttggtctcctgcaaggatcgcccaggatctagccccgcctcctcggtggaatacacctggattgcccatccccatcagggcctacagaaaaccagtgtgtttccctctaaaccccaagtagaaggctggcagcagtcctgggcctgacctcctagtggaatgctcaggcttggccccggccccaggtggaacccagccggcttgaccccgcccccaggttatgacgaaagcttggccccgccccctcggagcaatgcttcgggccttgtaacattagctaggggagcatcgggcaagggttcttcccatgactgtaaggtagtgatgtttcctcttcctccacagcccaggcttgcatccctccctgcggtaaggacttcatctaaaacttggaaattgcggggtaagggaggcggtcggggacgaaacgtacgacatcaagtgtgggaaagcgggtgggcttcacatccttaggaagccaataagatccctggagaaaaggaagaaaaccaagtattgctctaaatcctcagaaggtgtgtgtgagagccgaagcaaaccaataggaatcctagagggcggagaggagtgagagtcggccaaagacagcagggagggcggggtcaagatgccacctggccgatggaccccgggaagctgcatggatctcaaatgggccaagggccccgggcttggaagggcaggtggcgcctagacccagcgttcccgctccacaggtctccaggagttcgcccggcgtttcctctgcagcgggtgctactctagggtctgcgacctcccgctggactgcccaggtgagggggcggggcctcggggtgcaggaggccaacctgagaaaagggaccagagcaccgaggggcataagctggtggcgaggccagacgtggtcggggcccagcgagtgaaccctgctccgtcttcagttcaggatgtgacagtgactcggggcgaccaggctatgttttcttgcatcgtaaacttccagctgccaaaggaggagatcacctattcctggaagttcgcaggaggaggtgtgagtcggggcggggccggcgcgaagagtttagacgggcgagttagccttcactagaggttggggagtcagcttgcggggacgggactccgggaatctccgtctagacacaagcatcagcaagaggagggtcgcgggatttaggggagagctcgaagatcagaatgcaggaccaaggacctggggcgatggctcacgcctgtaatcccagcgcttttggagaccaaggcgggaggatggcttgagcccaggagtttgagaccggcctcggcaacaaattaagacccctcctctgccaaaaaattttaaaaacagccggggcgtggtggtgcacgcctatagtcccagccactggggaggctgagcgggaagactgcttaagtccaggagtttgaggctgcagtgagctatgatcgcgccactgcactgcagcctgggcgccagaacgagaccctgtctggaagaaaaaaaaaatacataaataaaagcagtttctaggggtaggttatgcgtaagggtttaaggagtgaggggaaggggtgcgtttagggcaggggagcgagaaggctcgggggcgggctcaaggctcagggccaggactccagggggcgtggtctggctcggggggcggggcttgtaggttactcagtggcaagccggagttgaggcgtttaaacccgcgtgtcccgcagctccggactcaggacttgtcctatttccgagatatgccgcgggccgaaggatacctggcgcggatccggccggctcagctcacgcaccgcgggacgttctcctgcgtgatcaagcaagaccagcgccccctggcccggctctacttctttcttaacggtggggcggggcgcggccgcgtgagtgagcggggtcgggagaggggtggggctcgtgcctggctgacgtgcgcgcccccgcagtgacgggcccgcccccgcgggcggagacagagttgcaggcctcgttccgggaagtgctgcgctgggcgccgcgggatgccgagctgatcgagccctggaggcccagcctgggcgagctgctggccaggcccgaggctctgacgcccagcaatctgttcctgcttgcagtcctcggggccctcgcatcagcgagtgcgacagtgttggcgtggtgagttctggggactccggagccccagcatctagctccccgctgtctcagatcccaccgagaagtctgggttcccagcaacctccaacccaggaggtcaggctttcagttcctcctctctcagacccacgagtccaggtcccagcccctctttactagcccaggaatccaagtccccagccccctcctcccttagatctaagagtccaggcccccagcccctcctccctcagacccaggagtccaggtccgcagcccctcctccctcagacccaggattccaggccccaaacccctactccttcagacccaggagtccaagtccccagtcccctcctcccgcagatccaagagtccaagcccccggaccccctcctccctcagacccaggagtccaggcccccagcccctcctccctcagatccaagagtccagacccccaagtttctcttccttcagacccaaaagcccaggccccctgccccctcctccctcagaaccaggagtccgggccctgtacacctttttgaccctggtgtccaggctccgggacctaagtttctagtcaccaacccctcctgtaacacacatacctctttgtttccccaggatgttctttcgatggtactgcagtggcaactaacaaaggtatctttcctccttccctatcctatttccatcctgaaaataaagaatatatttcaactctagattgtttcatctccgaaggtggtcactactaactcaggtaggaggaggtgcagcaagcccacacatgcccagatgaatatggcccgcataatgacagtgataggcatagctatcccagtgcaagttaggtgggaacccagataccccctcaggttactggctgtctccttgacatttccatctgcagaaggcaccctcaaatagagtcctccatgttgccctcagaggctgttcctccccaaggctttcctcctaccagaaagagcaacaccatccacctagcagttcaaaccagaaaccttggaatctaacttctcctccacttccaattcattttcatttccaaccctcagactttttaactcctaaatatctcatgaagctgccttctctgtggtcccagtcacccccacctcatgtctggatcactggagcagccccccaccacctccttggcctctctccactgtagcccattctctacataccagcaggacttgttttattttattttatttttttggaggcaccatctcactccaaggcccaggctggagtgcagtgatgtgatgtcagctcactgcaacctccacctcccgggttcaagcgattcttctgcctcagcctcccaagtagctgggattacaggtgcccaccaccacacccggctaatttttgtatttttagtagagacagggtttcaccatgtggccaggctgttcttgaactcctaacctcaagtgatccacctgccttggcctcccaaagtgctgggattacaggcgtgagccaccaagcccggccaaggacttaggttttaaagtgtgtcagattgggttactcctctacccagaatcctttagtgactccctgttgccattgagacaaaatccaattccttgtcaaagcctcagaggttccacaggtctggcctttgctgacctcaccagcagccttgtcccatacccctttcctccttgatcttgccaccctgcggtttttctctggcctttcctccttcctcgcattcatcatgatacttcttgccctctctagggtcttggttcacactgtttcctgcctagaataatattttctccttttttttgtctagttaactcttatgatttcccctgagtagccattacatctattaaccccgctaatccccttgacaagtctgcgcggctggcactgtattgacttaactgactctacctctccctcaggccccttgctactttccagccccagtggcctccttattaggtccctggaacatgcaagtctcagtcccatttccaggcctttgctgtgcttcatacttgaaatgactttcctctgagtatcacaaacccacctctctcattgcacagatcccagatcaaatgtctccttctctaactacctctctctccctgtttgacattgcccaatttcaccttgttcactgagctcatctggacctaatgttaactcttttttttttttgagtttcgctcttgttgcccaggctggagtgcaatggtgcgatgtcggctcactgcaacctccacctcccgggttcaagcgattctgctgcctcagcctcccgagtagctgggaacacaggcatgcgccaccacacctggctaattttgtatttttggaagagacagggtttcgccattttggccaggctgatctcaaactcctcacctcaggtgatccacctgtctcagcctcccaaagtgctaggggattacaggcgtgagccaccgctcccagccgttaactcattttttaatttggttttgcctttcctacctgaaagggaagctccttttgagcatgtactcattcttgttcactggtctatttccctttattgatttgctcattcagcaaatatttattgagtgcttactattttgtcatgtattttcaaggcactgtagagatcccaatgaagaaatcagaagagacaaaaagtttgtacagtactcacatggaacttacattctagtggacagtaaaacaaaactgtttctctctctcccttttttttttttttttgttttgtttgagatggagtcctggagtgcagtggcacaatcttggctcactgcagcctttgcctcctgggttcaagcaattctcgtgcctcagtgtcccgagtagctgggactacaaaggcgtgtgccaccatgcccagctaatttttgtatttttagtagagacggggtttcaatatgttggccaggctggtctcaaactcctgacctcaagtgattgcctgcctcagcctcccagagtgctgagattataggcgtgagccaccgcgcctggccagaaaactgtttctctactctcaacatttctgacactacatgtatgggattctacctcctgcccccataccaaccagttctccaactctcccggacaccagttgagtgtcctataattcatttaattctaaaatcaacaacccagggttagcgtcgcactacacaggttttaagagctcaggcccacaagactgcccccacttcagacaccagtcgcaagccaggggctcctgcaacctgcagccccccagctcagtaatttgctagaatagcttgaataactcagggaaacatatttactggtttattataaaggagagtatgaaggaaatagcttaatagccagatgaagaggtagatagggtgaggtccagaagggtcccaagtgcagaagtttctgtctccatgggagctgggatgcagcggcctgtcagtgcgtggatgcactcaccagcctggaagctctgcaaaccccatagtttagggattgttctggaggctgcaccatgtaggcatgattgcttatgaacttagtctccacccctttttccctccccaaggactggagggggcagcgggtgaggccgaaagctccaagctcctaatcatagcctagtcttgctggtgaccagcgctcttccaggagaccaccaagagtcacttgaatagaacaaacgatgctgttatcacccaggaaattcaagagattaggagctctatgtaagacgcttctgttgcccacatcactccagaaagtacaagggtataagactgtcagaaaccagggacaaacaccaaatatgtatttcttactatgtcacagacaataagaaaacagtaaaatacgaaatatggtaatatgtgtgatggagaagataagcagagaaatggaatatggggccgagggaagtagcagtaggatctgtggagaagccctcactgagaaagtgacgtttgaataaaaacttgaaggggatgacggtatgagccattatggatatttgtgtgaagagtgttccaggtggccaggcgaggtgactcatgcctgtaatcccaacactttgggaggccgagacgggtggattacctgaggtcaggagttcaagaccagcctggccaacatggtgaaaccctgtctctactaaaaatacaaaaattagcctggcatggtagcacatgcctgtaatcccagctactcaggaggctgaagcacgagaattgcttgaacctgggaggcagaagttgcagtgagctgagattgtgccattgcactccagcctgggcaacagagtgagacaatggcactccggcctgggcaacagagtgagactctgtctaaaaaaaaaaaaaactgttccaggcaaaaatttaaaaagggaaaagccctgaggcaggagtgccaggcacatgggaggacagccgggaggacatccaggaggccagtgtagctggaacagggccttaggaagtggatacacagtgaagtcagagaccatggggaccagatggtgctgctggctgctataaagtctagacttacctctgtaagagatgagggtcggctgggtgtggtggctcacacctgtaatcccagcactttgggggaccgaggcttgagcttgagaggtcaaggctgcagtgagccatgattacatcactgcagtccaacctgggctacagagtgagaacctgaatcagaaaaaaaaaaaaaaagagcaaggtgcagtggctcatgcctgcaatcccagcactttgggaagccgaggcaggcagatcacctgaggtcaggagttcaagaccagcctggccaacatggtgaaaccccatctctcctaaaaataaaaaattagccaggtgtggtaacaggtgcctataatcccagctactttggaggttgaggcaggagaactgcttgaacccgtgaggcggaggttgcagtgagctgagattgcgccattgcactccagcctgggcaaaaagagcgaaactgcatctcaggaaaaaaaaggcaaaaaaaaaaaaaaaaaaagatgacatgagccatgactgcaccactgcagtccagcctgggctacagagcaagactctgtcacaaaaaaaaaaaaaaaaagaaaagaaataaaagatgagcgtcacgggtggcttttgagccaagcaagggcaggcaggtcatgacttgatttccatggctactgtgtggctaacagactggggcaaagtggaagcaggcatcgctgtgaggtgctgcagtaatccagggacgagatgcagccctggggaacaaggtcgtgaggagcagtggctctagatatgtcttgaaggtagaatcagtgggatttgctgatggttcagaatgttggatgagagaaggagagaggccaagagtaaccacagtggcactgtgcagtcaaaccctctgccatgttggaaatattctagatctgcaccgtccagtagcgcagcaccagccacgtgtggccgtgaagcatgtgaaaggtgacctgtgcgactgaggaactgaatccataatcttaggtagctcttcaggcaagaaagggtgtcaaaaaaaataaaaataagaaaaaaatcaactcaggtagctgtaataactttaacattacatagttcctgctctatgacaacagcatcatagaggcctatgtgagtattcttacctgtggctcactcttaactctttgtttacttgactaagagctccttgaaggcaagcttcttaattgtttctatacttgcagacttggcagagtgtgtggcattcagtaggtgcttggtgaatgttttggtgactgatgaatcaaagaatgcatgaatgggaaaaaaatgttttagacttccatgtggtagtggctagtgatggacagttacagctctagcattttttggcctgagcagctgggaggatgaagttctgtttactgagatagactgatggaggagcaggtttcacggggattagcagggaggaaggcgagaagatattaggagtctggtttgagatgcctattaggcatccaagtagaaatgtcttggaggcagttggatatacaagcctggaatttaagggcgaagtctggtctgaagatctgtttgggagtcccgtctccatacatggagcatgaatgaagtattcagagccataacactggaggcacaagggaaatgggtatagatgggtaagagacgaggatgagaggatccaggaaagaaaacaaggtggaggaaagcaaggtagctgtggcttcctgaaagccaagtagctatgcttggtggctcacacctgtaatcccagcactttgggaagccgaggctggtggatcacttgaggtcacgagtttgagaccagcctggccaacatggtgaaaccctgtctctactaaaaatacaaaaatcagctgggtgtggtggcacatgcctgtaatcccagctacttgggaggctgaggcaggagaattgcttgaacctgggacgcagaggttgcagtgagctgagttcacaccactgaactccagcctgggcgacagagcaagaccctatctcaaaaaagaaaaaaaggaagtcaagtaaagaaagcgtttcaaggaagagtgatcaactgtgtcagacacagccaaatcatgaaatagggctgagaattggctattggttttagcaacgtggatatcattgatgaacttgacaagagcagtttctatggagagctaggggaaagcatgaccatctgattggcttgggtttaagagttaatggaagtcaacatcattagtcattagagaagggcaaatcaaaaccacaatgaaagccacttcacacctgccaggaaggctgtaatcaaaaagtcgggtaatacaaaatgtagcaagggtgtagagaaattagaaccctcatacattgctggtgggaatgtaaaacggtacagtccctgtgcaaaacaggctagcagttcctcaaaaaaattaaacatagaattaacataaacccagcaattcaatttctaagtatatacccaagaaaattaaaaagctgtgcccacaccaaaacttgcacacgaatgttcatagtagcatcattcatacagccaagaggtggagatatcccaaatgtccatcaactgataaatacataaacacaatgcaatatagccatactgtggactattatttggccataaaaaggaatgaatcagtgatacatgcaacaacatggatgaaccttgatatgctaaatgaaggaagtcacaaaaaaaagcacatactgcaggattgcattgatatgaaatagccagaataggtaaatctataaagagaaagcagatgagcagctgcccaggtcttagggggataaaggggtgagaaaggagaagtgagctgccaatggatatggggttccttttgtggggtgatgaaaatgttctaaaattagattatggtggtggctgtgcaaacctgtaaacttaactaaaaaccattgacttgtacacttcttttttttagatggagtctcattctgtcacccaggctggagtgcagtggcacgatctcagctcactgaaacctctgcctcccaggttcaagcgattgtcctgcctcagcctcctgagtagctgggattacaggcacatgccaccatgcctggctaattttttttgtatttttagtagagatggggtttcaccatgttggccacgctggtctcgaactcgtgacctcaagtggtctccctgcctcggcctcccaaagtgctgggattacaggtgtgagccaccgcgctcagccaaattgtacactttgagtgagtgaactctgtgcgagataaattggagacaaatatggacaactctcccaaggaaatttgctattaaccgaaatagaaatggaacagttgtttacagggaaactgaggtcaagagtgggggtcttaaaagtgggagagtaacaatatgttcagatgctgatgggaaaggctccgaagcgaaaggagaactgacggaggatcaggtgggaagaactgctggagtgaagtctttgagcagacaaagaggacatagggtctggtgccctgatggaagaggttggcactggcttggagcacagacaggtcaccctcagcaacaggaagaaggtggagtgtatggacacaggggcaagtgagtgggaagacgtggagatggggactccagcagaagttttcttttttaacccctattttctcagtgagataggaagccagctaagagggaggggaggaggtgctggaggtttgaggagaaaagggatgtgttacccttctaagtagacggaccagagacaaaagcaccatctgcagtacctgccagtgtgcggcaggtggcaggtgcttggtaagtacccgtgaatgagttgagtaatttaaccctcacaccaaccctgccccaggggattaataatccctgttttcaaaagagggaaccccaggttccaaggaaggagagtgtcttgtccaggttcaaacggctagcacccagcactgagcccagcgtccccaattctcaatcatccattccccttagttctcaaaaaggtggaggctgggggaaaataaataaaattctttattacatcctgatcacacagtagaaatggagattaaataagaacgaggagaaagcaggaccctttccctccactcctcagatcccacaccctgaccaataaataccctccctggagacccagaagtcccagtcccaatatagtccagactgaagaatcttgggctgaccccctcgttttgcagaggagggaaactgaggcccagagaaccacccagcaagttcgtggctcggggcccagcagctctcctctggcctcccctgaagacccttgaggcggcatccgcgtggctggactcacacctggacgcggtagcccccggtccgccgccggcaaagcctccgcacgcccacccagtacagcgtcaacatggccacccagtagcccacgtaggcgccggcccccgcggccaagtggtaggcctcggctgcgcgggaagggccgctccagtcggccctggcctcgtgtgctacgctgcggaccaggcccccaagcagcagcagcgcccagagcgccaggggcagcagagggacgtagttagcggccagcttccgccggcccgaggtgccccagccactctggttcatggtgactagcgccaggaacttggcaggcaggaggccacacatgtagaggggcgcgtagagcgacagaagcaccatgcgcaggcagccccgcagccaggccgcgaaggccgccttggccagtgccacgccctgcacgcacagcagcacccacagcagcgcccaagggcggcccgcgtagaacagacgcagcacagtggccgccacgaagaaggggaacaggccggagaccaccgcctcgtaggtcatccacgcatggtgccggtgccaccagagcgcgttgtacagccactcacggaagtacgacttggaccagcgtgtctgctggctcagccaccgcaggaaggacgagggcgtctctgagtagcagcgggacctggaggtgtacctgcacgggggcgaggaatgagggcatcatcgcgtgctccctggggcctgggcaggattctggaggcagaaatgaccactgtggacggccactgggggcgagtttcttaacctctctaggcctcagtgttctcatgtgtagaatagggtggataatggttcctaggcctggacgcggtggctcactcctgtaatcccagcactttgggaggctgagggataaggagttcaagaccagcctgggcaacatagcaagaccccatctctactaaataaataaataaataaataaataagcaccaatgggtgggatgcaatggctcatgcctgtaatcccagcactttaggaggctgaggtagggggatcacttgaggctaagagtttgagatcagcctaggcaacatagtgagaccccatctctaaaaaaaaaaaaaaaaaaaaaaaattagccgggcgtggtggcctgtagtcccagctatttgggaggctgagatgggggaatcacttgagctcaggagtttgaggctgcagtgagccatgatcgtgcccctgcactccagcctgagcctgagcaacacagcaagactctatctaagaaaaaaaaaaaggctctcataagacaaggatactgtaaggattgaatgaaattaaacgccaagtgcttaggaccagtagatagtatttgctcaataaatgttagctactaccgtttttactatgactattgctgttaccattactattgctgttactaatatcatgttggttactgacactattactaatactatcactaacatattactaatactaccatgcttactattactggcaggccctatagggaggagcaagatgggtgtggttgctacccagggtagtctatgtattagaacttctcaagggaaccatcaggcctccttcctgttttgtggcagacatcattaatcaatccctgcatggtttccagccaagcccacacaagaggagaatcctgggcattacttgacagtgtccagactccttcccctgtgtcacttggcatcctcagtggcctccctgcttccgaccttgccttttgtagtctgtacccaaaacggctgccagagggatcccattacaacgtgtcacttctctgcttaaaaccctcccatggctccctcatcttagtcagagtccttagacctataagcctttcatgagtggaccactccttaactctccatcctgctctcctaatactcccccagttcagtgctccagccacactattctcagccttgagccccatcctacctcaggcactccacttaacacttcacccccaaccccaaaacttcctatccaccacccttgcccggcattatttatctccataacacatatcatgaacatactgtatgttctacttatttatttcttgtgtgtctccccaactgatgtaatcaattggtgtcctgtctgcctattgctgtatccccgcagcttaaacattctaggcacctagtgaatatttgttgagtgaattaatgcatggattcccctggattatcccaagtttcctctgggtatttcagtggacctggctttgcagaaatcactctcccctgaacttcacttggtctagatcatcctcccctgagtctcatggaattacttgtcttctcttgaagaacttactagagttcaggtgctcctcttctctcacttgtttctttctccgtggctctctcactagttagatcccactctatccatttgtctcttgcccttcctacttcactccccactgtgctaccttggtctccatgacagaaccaactcaccctatctcaattctaggtggaattctctaccctcaccttgcctctcttggtagagttcaccgcattccatggttcaatgcaaatgccagccttgtcccttatagtatcttcccctcttccctaatatctcacttggtagagtccattggctcaatgcaaatggcccctctgcccattatggtatcctcctctctcctctaaagtctcacttgatagagcccattgtctggtgagttactttggatttggagaactctcagcatgcacacacgctaggatattcattggcctccacacatacccgaccacctggtcccctcagcttacttggtagcataacccatgctgagcatgcggttggtgaggtgccggtcatccccaaaagtacagtgggtacccaggaacttctggttgtaccaggcctcaagaaactgctgcaagaggttattcctatataggcctgggtggaggggaggtgtgaaagagtgtcagcctctgctgtcaccaacaccaactccaatgctgtttccagccccaaccccatctccagttccaaccccatcctcagtcatcataatctcaatctcagcactatctccaatcccatctccagcccgaatcctgtcctcaacctcatacgcactccaacttgcctgtcattgaactatacccactgtgactgcaaacctgcccaccccagtctcatcaccaatcccatatccattctcagccccatccaaaacccactgcaacctcaaacctggctccaactctgtctttgactccaagcctatcccatcttcttccccagccccagccccaatcgtcatccatatcctttttccaacctcactccccacaccaaactcagcttgagcccaagcagcatcctcaccgccagcttccagttttatcccatccccaattcctgccctgctgcatctttgttcccaaccccagtcacatcctcagccccatccggcttcccttctccctttccaccccatccacagccctcccaatctctgcccctgcttacctagaggaccgctgatgcaggatacacagtggaagtagctctgacaagcccgctccacattgaaggctacccagtatcgcaggctgcttaggaagctgacccaggagtccagagggttaaggatccgcacgtccccaccaacagcccctacccgggggtcctcgtccagtacccgcacgagctccagcagtgccatggggtccaaccttgtgtccgagtcacagacctgtaaggtggaaggggccaggatcagcacagacccctgcatcaggctgatgcttgagaggaaggcatcaaggggtgcaatgcagctggggcactctgcaaccgatctgaacataattttgagattttttaaagtcattttcaatgtgtagtcacagtttaacatgtactccaagatgcacatccttgtatgaacatgaacaataagacatataccatctcctctggtgtgtgagtgagacccctaacttgctactaagcaatagaatatggcagaagttatgggatataactgccatgattatattacctaatatggaaatggtgaataggttttgcaatgtaattaagtccccaaatctcttgactataagttaatcaaaaggagattatcctgggtgggcctgacctagtcaggagaacctttaaaagcagacctagaagtcagagagtctccttgctggccttgaagaggcaagctactgctaccatgagttctatggctgcaagaaagtgaattctgccaaccaacaaatacatacgcttgaaagataaccccaagccttaaaaaagacccagctccagctgacaccttgattgcaacctggtgatatcctgaaaaaaggatccagttgagctgtgctgactctgggctcatagaaactatgagataataaatgtgtttcgttcaagctgccaaacatatggtaacttgttatgcagcaatggaaaactaatataatgcattagaattgctacaccaggccaggtgtggtggctcacacctgtaatcccagcactttgggaggctgaagtgggcagatcacctgaggtcaggagtttgagaccagcctagccaacatggtgaaaccctgtccctgcaaaaatacaaaaattagccaggcatgatgacaggtgcctgtaataccagctactggggaggctgaggtgggagaatcacttgaacccaggagacagaggttgcagtgagccgagattcaaccattgcactccagcctgggcaacggagtgagattccatctcaaaaaaaaaaaaagattgctacaccaaatgggatggatgaatgagataaataaatgaaattaatctgtatattgaatacatagatagatggctgagtggttgaatgaaagaatctcaacactgaaggaggggaaaggaaggagggaagaaggaaagaagaaagggaacaaatctccacatttaatagataaatgaatgaataaatgagtaaatgatctccatattggatggatagatggtatatccatgagtgagtaaagaaaaagaatttctacactgaatgaagtaaggaagaacttttatttatttatttatttgagacggagttttgctcttgttgcccaggctggagtgcaatggtgcaatctcggctcaccgcaccctccgcctcccgggttcaaaagattctcctccctcagcctcccgagtagctgggattataggcattcgccaccatgctcggctaatttttgtatttttagtagagacagggtttcaccatgttggccaggctagtctagaactcctgacctcaggtgatccgcccacctcagcctctcaaagtggccggctggaagggtttaattttacattgaatggatggataactgaatcagtggatgaatgaacaaatgaatctctatattgaatggatggatagatgaatggatgagtcaagaatgagtgaaattgtctcttcctggaatgcgtaggtgaatgaaaaaaggaaagaatgcctctacattgaatgggtaaatgaatgaataaatgaacgaatgatctccatattggataaagggatagatggatggatgaaagaatgagtgaaggaaagaatctctccactgcatggatgaaagaataaagaaagggagagagtcattcaaatctgtacattgaaggaaagaccccaggaaagtgggatttgggtgttcgggtcacgagtgggctgaaggcgcctctactcacctgcacgtagtccaccgaatctccgagcgccttgaaggctgtgtacatgacctcgcgcttgccgccccagcgctgcgccacgcacacgcacctgcgagtcctcaccagcgcctccactgccagccgcccaggatcctccgcctccacctcccgataggctccggcgcccaccgcgcccgccgccgcgggttcccagggctggtggtagttgccgtcccacacgtacgtggcggggtcctcgtcagcgaagacctcgcggaacatgtcgaccatgtagaggtcctcggcgcggttgccatccaccaccatgaggacgcgcagccgcgcgcgcgggtacagcagggcgcgggcggacgccaggcactggcgcaggtacgcggggtcctcctggtaggcggagatggtcagcgccacactgcgcgcggtggctgcatccagcggcccccgcgccgccgccgccacccgccggtgctccaggtacgcgaagaggctctgcgccaccaggtgcgctgaaaggaaggccccgtagaggccgaaggccaggaggccgtagcgatcggaggccagcggcaccccggcggcgtaggcccaggtcatgaggcccaggatgagcagggcgaaggcgatggtcagcaccctccgggccaggccggagcagcggcaggctgcaggagtgggcttgggcgcgtcctgctgggagcgagaggggaaaggaaggggcatgagtcccgggcgcatgagcctcctccgagagaagattaaaaatcctttccttccttccctccttccctttccctcccctccctctctctctccctccctccgtccttccttctctttatctttctctctctctgtgtctgtctcgctgtctctctctctctctcgctctcgctctccctttctctctcctttcgttttttgttttttttttcttttgagacagggtctcactccagcctagtgtcgccatctaggctcactgcagcctcagcttcccgagctcaggctcagcctcccacctcagcctcccgagtagctgggactacaaagagtgtgccacaactcctggctaatttttaaatttttggtagagccgggggtctccctacattacctaggctggtctggaacccctgggctcaagtgacttgcctgccccggccttcctaagtgctgggattacaggcatgagctacctcgccgggccccaaaattattttcattaacgaaaataattggagcaaatagctatctaggcttcatgctgattagattccttcttttcattattatttatttttatagacagggtcttgctctgtcgcccaggctggggtgcagtggcaccatcatagctcactgcagcttctaactcctaggctctggcgattctctcacctcagtctcccaagaagctaggaccacaaggctggagtcactatgccttgctaattaaaaaaaaaacaattagaggaggggtctcactatgtctcctaggctccagtctcccaaagtgctatgaatacaggcatgagccaccaagcccagcctgattttgtttcttccaatacaacttttttccacgttttgaaatctcttaaatccgtgaggatgattgcatgcgatggagtgtcacaatttaattactagggcgtttccctcctctttcttagtggcacatacaatgaggatttatctcccaatcaaaggtttcttagggttgagacagtaataataataacacatactaaaaaaccaaaatgctgtgtaccagtccctgctctaagcctttaagatgaatgaatttattttaatctttacaacagcgctgtaaggtaggtactgttattattatccccgttgtacagatgaggcaactgagtcacacagaggttcagcaatttgcccaaggttgtccctggaaagcagaggaacctggatttgaaccctaggaactgaatctctaaacctctagccctcgggagagccctgggggacagatagtgctctgccaccatacaggtggccaaactgaggactgattggccagaaggagtggcttgcacaagatcagcagcccatggtagaggactcttctctctgactttccagaggcatagcctggttctccttttccactgcccaactccccagcagagccaggtgccccagtaaatgttgctggaagagcccagaatcagaggaaaaagtactttctgtgtgccagacactactgtacaacaaccttaatatatatatataaatttttttttaaattgagacagggagccagaaactgtggctcacgcctgtaatcccagcactttgggaggcggaggcgggtggatcacctgaggtcaggagttcgagattagcctggctaacatggcgaaagcaaaatacaaaaattagccaggcttggtggcgcacgactgtagtctcagctcctcagaaggctaaggcaggagaactgcttgaacccctgaggtggaggttgcagtgagccaagatggcaccactacacttcagcctgggtgacagtgcgagactccatctcgaaataataataataataatagagacagggtcttgctgtgtttctcaagttggtctcgaactcccaggctctagcgatcctcctgccttggccccctaaagtgctgggattataggcgtgagctactgcacccggtctctacaacaatcttataaggcaggtaccttcactgtcttctgttacagatgaggaaactgagacactgagaggcaaatacttttacccaaggtcactcaggtaataagcagagtcagaagtaaaactcaggcagtctggctctggcgtcccctctacgctaaactgcctcctatgccaccagttcctgcctcaaggcttactgtgggttatttaaatgcgtcgttaagatgtagatctttgtgtccaacacaggtgtcagcagccacatgtgtctaccgagtacttgaaatgcagccagtatcaccgaggaactgagttttaaattttatttaattttaattcatttaaatttaaaaactcttacttgattcggttattggaaagattttaaatatgtctggaacaagttgcatctacgatgccccttttataattgtaaatcttataaaatctaaacacagattaggtatttccagtgaaaaggtagcatctaagtgagaagtgctatgaacacactggattttgaaggccaagtctggggaaaagaaagtaaaatagctcattaacatttatgtattgattacatattgaaatgatcatatcttatatgtagcaggggtcggcatgctaagacctgctgcagcctgcaggctaagaatttgtgtgtgtgtttttagatggtttttgaaagccaaaagaagaataatagtttgtggagcatgaaaaatatgaaattcaaatttcagtgtccttaaaggaagttttatttgcatacaaccacattcatttgtttatacatcatctgtggctgattctacatttaccacatcgaagttgagtactttcaaaagagaccagatggcccccaaaagcctcaaatatttaatattgggccctttatttaaaaaaatgtgctggcccctgacacactgggttaaataaaaatatattattaaaattaatttcacctgtttgtttttactttttcaaatgtggccacaagaaaattttaaattagatattgtggttttcgttacatttctagaggacaaaactgaggtacagcttttaaactctcaacattaaacattattctttcttctcgaatcccccttctctcttcctttgcttcaaacctggccttgcctgagttcctagggatggctcaattcatgctggggatccagagagttgattccagaaacacagatgaacacacgtgtagacacactcccccacacgtgaactcacacatgatgagtgacacacagaatgaaattactcgtgttctacaggatgacccgagacacccactcaggccaaacacagcgatcccgtgacccccaccgacggccacacaggtgaacctgcagacacacacccctcagcaggaaaaagcaacaccagcaaaggatgtccacgtggccacaaacacacagagccccaactgagagtctggggcaatgggatgcacagggaagatttcaagagaaatagtaggtgactgtcaagctgatactgaaccagatgaaattgctattcttccaagtttagagtggctcagtatcggcgatttcatttggttcaacttaatagctattgaacgcatgaaacagaaatccattcccatgtgccacaggcaaatccaactctctttctcactcagtctctttcattcgctcactgtcgcactccctctttctctctgcctcccagggaacatagacatacacaagtttgtagcaagatacgcagatacagaaatacggacatggcacgtctcacctacatgtacttgggatggccgctcacacagggcaatgtatacacagacctgcacactcagcctcacatgctcactgtcccctacacacatatggtcactgtcaggcacatggatacacacatgaaatcatgcacacacagttccccaacacacgtggtcacacatatggcagtagttttccccacatggctgtatacacacacacacacacacacacacacacacacacacacacctgtctcatcgcagtgggtctggccgggctctctcttctctccggcttgctctcccagcctctctgtggccagagagctggaggggggtcatttgaagaccagcgcaggcgggggcgggagcgagcgctgacgtcagtcaggctaagctgggccaggggctctgaggtcacggcccagccgggcagctccacccgcttcccgctattactcccacccccctcagccagacgggcctcccttcccaggcccccatgtctacccgcgcccctcctctagtcctctctgccatcactccccctcctctccctccctcctctatgtcttcttctctcttcctcccccctctcgtcccttgtctcccctgatttttctcttccacctcacttgcattttgggggttcccctcatccccccatcccctatccctgtatttccctccatccctttctttctccctaacccactatttctcctcatctctttgttggtaccctcatctctctccccattaccacatttctccaagtttctgtctttctctccatccctttcttcctctccacttctcttgcctcctctcaccctcatttctttctcttcttgctttaaagctctccccacctcccccttctcaccttccccagtcacccccgccctgcttctccccacagccgcctctcctgtccccagaatccatctctgggttgggccccccagggacatgtctcagcaactggcagatggaacgaaactcacacacgtgcgtgctgtgggtgtgcctgtgtgtacgctggcccgaggcacggctgcctggaaccggagctgtgagtgaacatctgtccattcagcgcctaactgacgtgggtctgcgtgtgtgcaccagggtctggggtggagagctggggcgctgggatttgtatccccagggactcagggatgaacacagagagttgtcggtcagctgaccctggggagccagccggggtctgtcagtgctgtcacccatcagggaaactgagtcagaggaagggtgaaaagagatgcgggacctggggtgcccgaaccccagcccctcaggaccagatctgtgataaatgtctgtttacatgcccttctttccatgaattttttaaaaaaactatctgtatctaattctgttcttctctctgctcctcttactgtgaactattgatgtctcactttcggccttggtagctgcctcggtagctgcctcgttcttttctccctgcctgtgactccaacgacctttggtgtctggcacgggccagctccaggacaggctgaaagacatggagcagcagagagaaattcccccgtgcttctctctcctcgtctgtccctccccaaatctctgtcattttgtatctgtcaccccatctctgtttctcggtccctctatttgggtctctgcctctgtgtattcctgtctgtttctcctcctcatcccccctcacagccattctctctctgcttttacctgggagtgtctgtccctttgcatttctgaagtctccctgactttcttcttgtgtggctctctttctttctgagtgcctctccctgactttctcactgtgtgtccatgtgtgtgtgtctctttctctctgtctctttttccctctatctccctccctctctagctctgtctctatcctccttccgtctctctgcatccccatctctctctttttttttttttttttttgagacggagtctcactctctcacctaggctggagtgcagtggcgtgagctcggctcactgcaacctccgcctcccgggttcaagcgattctcctgccttagcctcccgagtagctggaactacaagcgcccaccaccacacctggctaattttttgtatttttagtagagatggggtttcactatgtaggccaggctggtctccaactcctgacctcaagtgatccatctgccttggccttccaaagtgttgggattacaggcgtgagccaccgcacctatctctttgtaaggctctatctctgtatgtgtttctctgtctctgtctctctcattcagtttctctccatttctctgtttctacatcttcgtctctccctgcagttccatctcttccagcctgtcccggagctctcccctgccagacaccaagtcctcacaccaagtcctcacaccctggggttttccccgaggaggctgcgccaggccaagcctctgcctgggcctgtcagggagaaggtgcattcccaaggagctcgaacgcccttcccacccaccagggcgggccgggctgtgtctgacgctgttgccgggagccgggctgcctggtgtctggctgtgtcaggatgatgggtcctcagatgatctgaggccagcccagagcagaaggggagggtgagtcctccgcccagtgggagggggcagcgcaggctcctccccagaagtggggcatttggctgcccagcccccaccccgccctgctcgggtggagcagctgtataaaaccagatgtttctaaaaccagagtgcggttgaggaaggataaccagggctttaatcctcaacagttccctcctctaagacccaggagtccaggttcccagcaccctcctccttcagacccgagagtccagaccccagcccttcctctctcaggcccaggagtccaggttcccatgtccctcctccctcagacccaggatcccagacacccagcccctcctccttcagacccaggagtacaggttcagagttcctcatccctcagacccagggtccagacccccagtccctcctccctgagacccaggagtccaggcccccagccccacctccctcagacccagaagtccaggtccccagcacccctccctcagacccaggagtccaggctgccagccccgcctccctcagacccaggagtccaggccccatcccctcctccctcagacccaggagtccaggccccatcccctcctccctcagacccaggagtccaggccccatcccctcctccctcagacccaggagtccagactccatctcctcctccctcagacccaggagtccaggcccccatcccctcctccctcagaccctggagcccaggcccaggcccccatcccctcctccctcagacccaggagtctcaactcccagcttccttctcccttagacctacatgtccagcccccagaatttcttgcaggaagagatgaccaaggctggaagcagcccagacaagtgctgaaagacagggagcagtgaagctgaacactcccacagcaggccggggctgttgttggagggacaggtagggacaccgcacccctcgctaacacccatggctcctagaaacccccattcctctggtggctgctctccagttcctgccctgggtccacagtggccttcccagcatttcagccatcatcaggaaacctcagggtacagcttacagaatacctggacagaaggagcacagggtgggagaggtaaggcaaaaatggagcaaaggcagaggagagaacattcattcattgtggggacatctcctgagccctggtggacagggctgggctgggcgatgccgggcacacagagatgactcagccctgggccctgcccttggggagatgccaatctggtggagaagacagctgtgtaaacagagggccacaaaacagtacaaggatgcaccaacccagcccaagagtcagggagggcttcctggaggaggtgatgctggctgatgaggcgttagccgtggtcagggtggtggtggacggtggggcaagaaaggggcatccaaggcaagaaatggtgtggccagtcaaaaaagtaagggcggattgatgctgtgaagcacaaagggtgaaacaaggggctgggggattgtagggtccctagtgaggtccgctcatttaggtttaaaaaaattttttttggccaggcacagtggcttatgcctgtaatcccagcactttgggaggccaaggcgggcagatcacttgaggtcaggagtttgagaccagcctgtccaaaatggtgaaaccccgtctatactaaaaatgcaaaagttagccgggtgtggtggcgtgcacctgtaatcccagctactcaggagactgaggtgggagagtcacttgaatgggaggcggaggttgcagtgaacgaagattgcgccactgcactccagcctcccgtctcaaaaaaaaattttttttaaactaagtaacaattatacatatttatggtatacaacatgacatttgctatatacatatatatatattcgttgtgaaatggctaaatcaagctatttaacacatgcaacgtgtcgggttttgaatgcaggaatcagaggctaggactttgctctggtggcaatggggagccatggaagggctgtgagcaagggaggggcaggatcagctctttgtctgagtaagggacaaactggagggagagacagggggctctgggccaggatgagttgctggggggtggggttgcatcagagatccctggggcttttccaggctagagaggaagtgtgagtgaggttgggcagaggtgcaggaccccgaggagccaggaccaagaagactgggggatggacacagacatggcgggctaacttgccaagcccctaacctcagctagttctggctacagttgctcctcgctttgctccatctcaggcaggtacctactggggaaccagtgagggcaaggggcccctgggcagtaacctgaagagatccttgttttattaaatgcttgaatcccggtagatggtttctttgccaggtgtcctggattgggaagggaaatgcacactgcggggatctagataccgagagacagaggagaaaaggagggagggagaggaatgaaagacagaagctggcttccacgaccatctattcaacagcgaaaaactgccctacccctggattcctgaccccctttactctcttctgctttttctttttccccatagcattggtccccttcctatataacgtataacctgcataaggtacgtttagtatcttttttgtgtaatgtgtgtcttcctggttcgaatgcaagctctagacaggcagctgtctttatctggtttgttcatggctcattcctcagagcctggacctgtgtctaggtaggtgctcaacaaatatgtgttgaacaatgtgtgaggtcaggatagaaagtcagattggtagatggagaggggaaagaaaaaggagagcgaccgggcacggtggctcacgcctgtaatcccagcactttgggaggccaaggcaggtggagcacttgaggtcaggagttcaagactagcctagctgacatggtgaaaccccgtctctactaaaaacacaaaaattaggtgggcgtggtggtgcatgcctgtagtcccagctactcaggaggctgaggcaggagaatcgcttgaacccgggaggtggagtttgcaatgagccgagatcacgccactgcactccagcctaggcgacaaagcgactctgtctgggggaaaaaaaaatggagaggaaggaaggaggggaaggaaagataagggaagaaggaggaaggagaggaggagggagggaaagagagaaggagggggaggaagatcagaagaggaggaggagaatggaggagggagagagagagggaaggataggcaagagggggaggagagaagttggggagagagggcctagcagctgggacccccaaccgactcctgcgtaatagttctatggacaccactcagagtggccagtcctgggaggatgggttgaggagctccggggaggtgggaccttagaggaaaaagactccaggatcagcaaagaccccaagtctgtaaagagactgcctctggacttccaggaactcagaaccttggatgggctggagttagacgggaccttttctcccccacatgcctattctgggaaacccctaggcttccatgattctgccgaaatccagggagggagggagggagcctagccagcaatgatgactgtacatccaccttctgcctccagctagtgcctctgggagaaactgtaggacttccagagctgggaggagggagagaaaggcctggagggggagagccctgcctgtaacaagttgaaggcactttctaccccagcatgcaccatctctcctgccactttccctggagagaaacagagacagtaagagccagacagagggagagggagggaggggcttccttttgcaaaagctgtttatcctctccagggaagcaagagaggaggagacccattttccagatagggaaactgaggcacaagaagagtcatttcctgggacaagtgatacagcacacaggcagcatggctgggtaacagaaatcaggtggtaggcattaggtcactaggctatgccctgccagtcacagaggaaggaggagctgggggcttagactaagatctgagagcctggattcctgagtctgagggaggagcggctgggatctgaattccctggtctgaggaaggaggggctggacctggactcccgggactaagggaggaggggctggacctgaactcctggatctgagggaggagggcctgggacctggacttctgggtctgagggaggaggggctgggggcctagactctggggtctgagggagaaggggctggacctggactcctgggtctgagggaggagggggtgggggggctggcatccagtgggctcaagatgaggcctggacccctagattctcagctctactgcgttccgagctatcagggaatctgccccgatattcatgtaggttcttttctattttccttaagcgttggccagcttgagaaataaagggacagagtacaaaagagggaaattttaaagctgggtgtccgggggagacatcacatgtcggtaggttccgtgatgccccacaagccacaaaaaccagcaagtttttattagggattttcaaaaggggagggagcgtgcgaataggtgtgggtcacagaggtcacgtactttacaaggtaatagaatatcacaaggcaagtggaggcagggcgagatcacaggaccgcaggaccgaggcaaaattaaaattgctaatgaagtttcaggcaccattgtcattgataacatcttatcaggagacagggttttgagatcaactggtctgatcaaaatttattaggagggaatttgctcttccaaataagcctgggagcgagcgctatgggagactggagtctatttcacccctgcagtctcgaccataagagacaggagcacctgggggggatatttataagcctatacctccaggcgcgtattctctttcccagggatgttccatgctgagaaaaagaattcagcgatatttctcccatttgcttttgaaagaagagaaatatggctctgttctgcctggctcaccagcggtcagagtttaagattatctctcttattccctgaacaactgctgttatcccgttcttttttcaaggtgcccacatttcatattgctcaaacacacatgatctacaatttgtgcagttaatgcaattattacagggtcctgaggcgatatacatcctcctcagttgacaggattaagagattaaagtaaagacaggcataggaaatcacaagggtattgattggggaagtgataagtgtccatgaaatctttacaatttatgtttagagattgcagtaaaggcaggcataagaaattacaaaagtattaatttggggaactaataaatgtctatgaaatcttcgcaatctacgttcttctgccatggcttcagccggtccctccatttggggtccctggcttcccgcaacaccgagccctgacagaaaacttcccaagcccaggttcctcttgcacatgtggtttagctctgtgggttaccccctcctctctgtaagttcccattgtccaccttgcctcctgcatcggcctccaccacagtcagggcagaggagtctctgtaggacaaacacagcaatcagattcagaaaatagatccaaaggtggggatccagggcccagggctggtggcctggacctctggggctgccagggaggagtaggtttgaaagaaaaccctgggccaggcgtggtggctcacgcctgtaatcccagcactttgagaagccgaagcaggcggatcatgtgaggtcaggagttggaggccagcctggccaacatgatgaaatcccgcctctaccaaaaatacaaaaattagctgggtgtggtgctgggcgcctgtaatcccagctactcgggaggctgaggcaggagaatcgcttgaacccgggaggtggaggttggagtgagccaagattgcaccactgcactccagcctgggggacagagtgaaactgtgtctcgaaaaacatgaataaatgcaagaagaccctgtttctccactccacacttctgacaccaaagaggccgggctgcattcccaccaacaatcaattctccaactctctggacagcaactgcatgtgtaacaactcacttcagttctgacactaactccctggagttagcacagcccccacaggttgagggctcagtcccacgggagtgcccccgacttcacatgccagtcacaggcactgggaccacagggtacccacacttctatctgacttggctacaaatcaggggtcccacaaccccttcctgacattccataatttgctatcacagctcacagaactcaggggggtgctttacttccatgtaccagttcattataaagagtattataaaggttacaggtgagtggccagatgagggggaacataaggtgaggtccagaagggttccaagtgtgagagcttctgtctgcgatggcgtcatgtggacgtcttcatcaacctggaacttctcggaaccctattgtttagggtttttgtggatgttcctttacctgggcattgttaacagaaaaaccaaactctataaagtattttattgtatttatttttatttatttattaatttttggagtcaagatctcactctggagtgcagtggcacaatcatggctcactgcagcctcaaccttctgggctcaggtgatcctcccacctcagtttcttgagtagttggggctataggcgtgtgccaccacacctagctacttttttaattttttgtagagatggggtctccctaggttacccaggctggtctcaaacttctgggctcaagtgatcctcctgcctcagcttcccaaagtgctgggatttttggcgtgagccaccacacctggactctgtaaaatattttaaagaagtttattctgggacaatttcagtgaccgtggtgtgcccaaggttggccagattaagtttggtttgatgttgcagccataaaaaagaatgagttcatgtcttttgcagggacatggatgaagctggaagctatcattttcagcaaagtaacacaggaacagaaaacgaaacaccgcatgttctcactcatgcgatcatgagttgaacaatgagaacacatggacacagggaggggaacatcacacaccggagcctgtcaagggagggggtgtgggagataagggagggagagtattaggacaaatacctaatgcatgcagggcttaaaacctagacgatggtgcagcaaaccaccatggcacacatatacctatgtaacaaacctgcacattctgcccatgtatcccagaacttaaagtaaaaattgatttgatgcattttagggaggaaggagttacaggcaaagtcataaatcagtacatggaagacatacattggtttggcctgaaaaggcagaatatcttgaagaggggcgggctgacaggttacagatggattcagggcttctttaatttgcagttggttaaaggagtaaggtctgcttaaaacctggagtctgcaaaacctggagtctgcaaaaaagaatgttttaagataaggatgagggatgtagcaagattgatggcccttagaagtgacttaacacttgccttaggtcttgtatgtaatttggtatcttatcatcacaaagagtctgttttgtcaatcttacgacgtctattttaactataatgctggtcttctgtgttcctaaactccaaaagagaaggggcataagaaggcgtgtcccacctcccttgaagtcatggccaggaactcagtttttaggtttctctgggatccctttggctaagaaagggtcttgctgagtcagtggtggtgatggtgagtggggtggagggagggccttaggattttatttttattttatagcatgattgattaaatcattggccactggtgattagtcaatctccagcccctctcccttcttggaatttagagcatgaggctaaaaattccactgggatcacagggttcgtctctctggcaaccatccccgatccgcccagatcctcctcattagcataaactcaggtatggctggtaggggctaattatgaataacaaaatatgttcttctcacctcctcactcaggaagttacaagaattttaggagctctgtgctagaaattaggggcagaaaacaaatatatatttatttatttttagacaagtcttcactctgtggcccaggctggaatgcagtggtgcagtcactgttcactgcagcctcaacctcccaggctcaagcgatcctcccgccttagcctcctgagtagctggaaataaaggctgtgccactgtgcccagctaattttattattttttgtagagacaggagctcactatattgcccaggctcactatatattgcctatattgtctcaaactcctagtctcaagcaattctcccacctcgacctcccaaagcactggaattacagttgtaaaccacctcacctggcccaaatacatatttctttctttttattttttattttttgagacagagtcttgctgtgtcatcccggctggagtgcagtggcgcaatctcggctcactgcaacctccacctcccaggttcaagcgattctcctgcctcagcctcccgagtagccgggattacaggcgtgtgtcaccacacccagctaatttttgtacttttagtagagacggggtttcaccgtgttggccaggctggtctcgaactcctggcctcaagtgatccgcctgccttagcctcccaaagtgctgggattaaaggcatgagctactgcgcccggccccagatatatgtttcttattgtcttagtcccttctggctgctctatcaaaataccctaagctgggtggcttataaacaacaaaaattttatttctcacagttctgaggctggcaagtccaggacctgggtactgacagatttggtgtccggtgagagtggattttctgattcataaatggggtcttcttgctgtgtcctcacatggtggtgggggcagggtcctctctctcgggcttcttttgcaaaagcaccaattgcatgcatgagggctccaccctcataacctcatcacctcctaaacatgctcccttctaataacatctccttagggattaggatttcaacaatgaagtttaggggacccgaacacttattccctcaccgttagttgcctgttcttggcgtggagccatttcattcctctgagcctctcttttttcatctgtaaaatgggactgtctcaatttgtccttcataggatagccctgaagattaagagagagagtctgtctggcacattagaatatgaggtgagtttagccgttcctgaaacagcagagtttgaaggtctccaagactaactcaggtggcaacagggggatgcttccctggataccccaccccttcaccctccctggataccccacctctcctctgaggagtaagccaggttggagctgggaggagcccacactctgtcatcagacacccctgggttccaaggcaggcaggcttgcgcaagccaactcctggctctgagcctccttagccacctgcagacaaggaggacccttccccatgttgatgcaggtgagtggaactctgtttggttcctagtctttcaagcatggggtgaatagaccctcttacccgggacatagcagaaagctccaaacagtttggtgaacagccagactgtgcagcacagagagtgtgtcatcaaaggggcacgcctgtgggctccagatagaggacacagagctgcagaagtccggcggcccctttctgtgacctgggctgcaggcacccacagtccagaggctcaaaaccacaatgccgtcattcccagtgaatgctgtaagatgaagaggaaataacgctgccgtggtttcccatgaggggattacttaagaggatgtcctaacccccagaagctctgactgcaaccttatttggaaagaggggttttgcaaatgtcataaaactaagaatttcaagatgagcatatcctagatttaaggtcggccccaaacgccacggcaggtgtccttataagagtgaggcagagggaggtagacactaaacacagagaagaaggtgatgtaaagacggcggcagagattgcagtgatgcacccacaagccaagtgtattagttttctaagggttctgtagtaacaaaatacatctgtccctcagtgtccttggttccacatgtagtggggttgacgggtggcccccaaaagatacatctaagtcctaacctgcagaacctatggatgtgaccttatttggataaagggttttaagagcttttgcaggtgtcatgaagttaaggattttgatatgagatctggcttttcaacactgataccatcctggccaacacccttctggtccttgtgataatttccattttccaaatgttgagagataacacagagatgaaggaagctgccccaaagcacatgagacacggcctccgccatcagctcttgtcatcgtatgttcaagtgttctgcaaaactggtccgtggagcccaaagcatccacatcatctgtgtgcatttgctaaacatgacgactactggtcttcactgtcatttattcagattttgtgagctcagggctatggaaatgatttaaacaaatgtcccaggtaattcttacgtacagtttgagaaccatctgattaggaaaaaaaaaatgcctcccaaagtgaaataagaagactgaatgcctgtaatcccagcactttgggaggccgaggtgggagccccagggggttcgagagcagcctggcaacacagtgagaacttgtcactacaaaaaatttaaaaattagctggatgtggtggcatacgcttatagttccagttacatgaggggctgaagtgggaggatcacttgagcccaggagatcgaggctgcagtgagctatgattgtaccactgcactccagcctgggtgacagagggagaccctgtatcaaaaagaaaaagaaagtgatgcagagacataggtggagattggagtgatgtatcacaagctaagtgtactagttttctaagacttctgtaataaaaaagtacagctgtccctcagtattctctgaaggttgcttccaagaccctgcggatactaaaatgcacagatgagttcaagacacttacataagattgtgtggtatttgcgcataacctatgcacatcctcccatatactttatttttatttatttatttattattatttgtttgagttggagtcttgctctgtcacccaggctggagtgcagtggtgcaatctcagctctgccccctgggttcaagcgattctcctgcctcagtctcctgagaggctgggattacaggcaccctccactatgcctggctattttttgtatttttagtagagacggggttttgccatgttggccaggctggtctcgaactcctgacctcaagtgatctgcctgcctcggcctcccaaagtgctcccatatactttaaaccatctctagcttactgatgatacctaatacaatataaatgatagacagttcttctactgtatttttaaaatttgtattttttattacttttttcaaatattttctattcgtgattggttgaatccttacatgtagaaaccacaaatatgaagggccggctgtgacacaaactcaggggattaaacaacagaaatttactgtctcaaagttttgccagctagaagtccagaatcaggatgttccagcagacttggtttcttctgagggctgtgaggcagaatctattctatgcctcttgcctagattctggtgattttttttttctttctttgagacaggctctttctctgctgcccaagatggagtacagtcagctcactgcccactaacctctgagccagtgagctgacccagccccaatcagctctttgcaacttctgcctctcaggctttagccaacctcccatctcagcctcccaaatagctgggactacaggcacaggccaccatgctcagctatttaaaaaaattttttttgtagagatgaggtctcattacattgccaggctagccttgaacttctgggctcaagcaatcctcccccatcagcctcccaagtagctgggactataggtgggagacacctcacctggttagcttgttttttatttttattaatttatttatttttgagaggaagtctccctctgtagcccaggctggagtacagtggcgcaatctcagctcactgcaacctccgcctcctggattcaagcagttctcctgcctcagcctcctgagtagctgagattacaggcacgcgcggccacacccggctaatttttgtatttttagtagagacgggatttctccatgttgaccaggctgttctcgaactcctgacctctgttgatctgcctgtctcagtgtcccaaagtgctaggattacaggcataagccgcagcgccctgcctatttttattttttagacagggtcttggtctgtcacctgggctggagtacagtggtgtgattgtagcttaccacaactcagaactcctgggctcaagtgatcctcccgcctcagcctcccaagtagctaggaccataggtgtgcaccaccacaccctgctcactttttaatgttttgtaaggacagggtcttgctatgttgcccaggttggcctcaaactcctgggctcaagcaatcctcctacttcagcgtcccaaagtgcggagattacaggcatgagccactgcacttggctgcttctggtgcctgacactgacaatctttggtgatttgctgacagtctgtggtgttccttggcttgtggaagcatcactgcaacctctgccttcctcatcacatggcgttcttcccgtgtgcgcacctgcatccgaatttcccttttttcataaggacaccagtcatgttggattatgggtccaccctagtccagtatgacctcaccttaacttaaacaattacatctgccatgatccagtatccaaataaggacacgttctgaggggctgggggttaggacttcaacataggaatggagggtggggagaggacaaaattacatccctaacaccaaggaatgctaaggatggcagccgccactgggagctaggagagaggcgtggaagggattttcctccagagcctccaaaaggagccaaccctgccgccactttaatttcagacttctggcctccagtactgtgagataatccatttctgtggtttgaagccacttggtttgtggtaatgagttacagcaccctagcaaactaacatgccagcccagtgcggggtacatgtggagcgtaagatgaacaagctcctctctgtgccctggggaggctcacagggaccatgcatgctcttctaaggtgcacgtgatcagagcagatcactgagggagcgtttccgctcccctaaccccaggtgcagggacttcagagtaattcctactaaatgacccctaccactgttgcttgacaaagggaggtgcgagggggaaaaaagactatgagaatgggagagggcgggtaatacaggaagtgtcacgtcactctggttgcagaggacagagaaaacaaccctgtctccagcaggtggaaatggtcataatgttgatggtggccatgatatgtatgtttttatcttattatattttgagacagggtcttgctcttactccccagaatagagttcattggcatgatcatgactcactgcagcctcgacctcccaggcccagcctcgattctcctgcctcagcctcctgagtagctgggactacaggtgtgcgccaccaatcctggctgattttttttattttgtatttttttatttttgtagagactcggctttgccatgttgcccaggctggtctggaactcctgggctcaagtgatccgcctgctttggcctcaaatgttggggttacaggtgtgagccactgtgcctggccagccgtgatacagatgctcagctctatgcttcccatctcatgttcatgagctccaaccaaaagattccctcaggcagctattactgctcgcatgttaaagaagagaaaattgacattcgaagagggaagtgacttgtctgaggtcacacaagcagtgacagccgggatctgaacatgactgttacaggatccaaaatacatgtgctttctacactgtgaggtgctggtagatgtttaacaactggctctccaaggggaaaaatgtatgtctgtgtataaacacatatgtttataatacattttgtaattttactgattataaaggatatgtaccacacactttacaaagaataataatataatctaaaattctctttattgtaaatgccatacaattataacttcagggtgacttgctatttcttgcaaaatccagtactagtttttattttattttttgtttttatttttttgagctgtagtctcgctctgtcacccaggctggaatgcaatggtgcaatcttggctcactgcaacctctgcctcccaagtttaagtgattctcctgcctcagcctcctgagtagctgggattacaggcatgcgtcaccacgcccagctaatttttgtatttttagtagagatggggtttcaccatgttggccgggctggtcttaaactcctgacctcaggtaacctacctgcctcagcctcccaaagtgctgggattacaagcatgagccaccatgcccagcctgtttgcagattttttaaatgtctggtttaataaaggacagatgaactctcttttcttctgtatccaaaccattgcaataattttgttttttgttttttgtttttgtttgtttgttttgaggcagggtctcactctgtcacccaggctgggcaacatcgtgagatcccatctctgcaaataaataaataaataaataaataaataaattagttgggcatggtggcatgcacctgtagtcctaactacctgggaggctgaggtgggagtttgaagctgcagtgagctatgatcataccactgcactccagcctaggtgacagagcaagaccttgtctcaaaaaaaaaaaaaaaaaagtgagaatacagctttgggctaaacttaataagattaacatttatttatttatttaattttattattattattatttttgagacaaagtctctgtgtcgcccaatctcagctcactgcaacctccacctccctggttcaagtgattctcctgcctcagcctcccaagtagctgggactacaggtgcctaccaccacacccggctactttttgtatttccagtagagacagagttttgccatgttcgccaggctattctcgaactcctgacctcaggttatctgctcacctcagcctcccaaagtgctggggttacaggtgtgagccaccacgccagacccaagattaacatttaaaaggtagacttagtaacacagcttaccctctctattgtgggcgggccacgtccaatcttttgaaggcctgaataaaacaaaaaggctggcccttctacgaataaaaggaactcctttcctgtcaacctttaagctgagacatgagtttttttcttgcttttggacataaaataaaaacattagctctttctgggtctcaagcctgccagcctttggactggaactacatcattgtctctccttctcagcccttcagactaggactgggactgcaccaccagcattcctgggtctccagctctcttcaacgaaatcattttagtgtactgcctttttcttgaggggaccattactgatacagaaaaagtaattgaggccaggcacagtggctcacgcctataatcccagcactttgggaggccaaggcaggcagatcaccagaggtcaggagttcgagaccagcctgatcaacatggagaaaccctgtctctattaaaaatacaaaaattagccgggcgtgttgatgcgcacctgtaatcccagctactcgggaggctgaggcaggagaatcatttgaacctgggaggtggaggttacagtgagccaagattatgccattgcactccagcctgggcaacaagagtgaaactctatctcaaaaaaaaaaaaaaaaaaaaaaaaagagagagaaaaagtaattgattttccccagatcacagagcttataagagatgaggtccagattccaatccagtcaacttgttaggagggtctgtattcttaacgtctaaattctacaagagggattttttccccatagaggcaccattcagggtgagctggatattgttaggatttgggagccgacaggggctatcatttattctcgttctttgaccacatcataggccattgcctcttctctgtttgctggttcatgcaagaccaggagctcccccagtaagtggccggaagggtaatacccaccccccgcaagccaagtctctccccattctcttgctcagcctcagtcacgggaaccaccctgtggttgattcattctgacaattattataggtagcttaggaacggatggttgagttgtgagttgcagaaactcggtcaagctggcttaagttaaacctgctggaagaacacaagggaatttaaaggaagccaactgcagacagtgcgtctagaccttagaggaactggaacattatctggtagcttctccctaccccttgcaatctggggcttcatcatctctcacttcttctctgttcaaatcctctgctcagttctctctctgtgactctttctagcaaatgatccagccggagggtgttctggagattctgcaaattggcagaagcgagggtggtcttgtatgaagggtctgccctctaactttgtagcagggtcctattttactacactctccttctgggcctcaatttctccatgtgtcagcataggaagaactctctgacttaatggagttggtgaccaaaggggttccaggatttacaagtatcctgcgtaattataaaagaggtacagaagcaaaaggtttagttaaaccatcattcattgaagccttttgtatgcagggaaaaggcaaggatgacacgatgccctccagaagctctggggtcagtggcataggttaaataaatgcattggatgctgatgagtaaggcttgcagagcttcgtggggggtgtacagaaaaaatcatcatgggagtctagagaagagctagattcccaaggaccacatcatgtcatcaaaactcaggaatctccccttgcactgagatgaaattagccctcatcacccagcccctcacccaaagacaggttctgctgtaagttaattctggatgctccaagcttctccttcatctctcttctttctattcattctctctccatttctcttctgtttcttgtttataataaaatgatggccaggcgcagtggctcactcctgtaatcccagcactctgggaggctgaggcgggcagatctcctgaggtaaggagttcgagaccagcctgaccaacatggagaaactccatctctactaaaaaatacaaagtgagccaggtgtgatgcatgcctgtaatcccagctactctggaggctgaggcaggagaatcgcttgaacccagtaagtggaggttgcagtgagccgagattgtgccattgcactctagcctgggcaacaagagtgaaactctgtctcaaaaataaataaataaataaaataaaatacaataaaatgatgatgtctgtaatggtaattaaatgattattcaagagccgacaacagaaatcttcttgatggggtgtggtggctcacacctgtaatcccagcactttggaaggctgaggcgggtggatcacaagatcaggagttcaaaaccagcctggccaatatggcaaaaccccacctctactaaaaatacaaaaaaatttagccgggcgcagtggcgggcgcctgtagtcccagctaacctggaggctgaggcaggagaatcgcttgaacccgggaggcagaggttgcagtgagctgagatcgcaccactgcactccagactgggcgacagagtaagactctgtctcaaaaaaaaaaaaaaaaaaaagagctggcaccagaaatcttcttaaggaggatactgttattgataaatgacttgagttaggaaaggagacctgagggataaagagtcagagtcaagggtaggatggctaaatttctctgcgttgtaaaaaaaaaaaaaaaaaaaaaaaaaaaagcaggaatctggaggtgaggagataagagggagggtggacttttaaaaggatgtcttaagttcaactggaagctttcatgtttgtccgttgctggccagttgcatactctaacatttccaagcttctttctgtaaagtgtgtttcatatttaaataccttgtgcaggtagcttttcagtaaattgaaggaaatgtctgagttcctctctgggttaatttcatcagggcagcaaccaccagacattgtgtgaactggactaactcagttgaagcaagacttagagccacaggtaaaaacacgggccctgggggccctcccttgtggagaggataatctgtttcccaaaatttattatataaaagattaggcatcaggtagatctcaaggaaatgaggggtcttcagctgacatctcgataactttatatttttactgagttgttgaccgataaaggctgaggactttatataaagtatcttctttttttttttttctgagccggagtctctctctgtcacccaggctggagtgtagtggcgttttcttggctcactacaacctccgccttccaggttcaagcgattctcctgcctcggtctcctgagtagctgggattacgggagcctgccactacgcccagctaatttttgtatttttagtagagacagggtttcaccatgttggccaggctgttctcgaattcctgacccctggtgatccgcctgcctcggcctcccaaagtgctgggattacaggcatgagccaccgctcctgccctatataaagtatcttcttgtatatcttgtctgatttaagccatactctttcacacttctccctcctccttcatttacctaggatgactatataatttatttttcacagcagggcacttttcagaatggaagtggacactactcatcatgatgccagaatgatgggtatcattcactactcataattcaggactaataataatgggtattatttgggttcatttcaggcaaactaggatgcagatgacagcttcttcctatcatttcccaccctgaccacccaaggctgaggtccaaaatcaaaaaagaagtcaataataaactcatatctgtttattctccccaaatcaggggacacaaaggcttttttttttttttctgatgagtgggtaatcctaaaataagcaggaaatgcctgtggctcagcctaactcaaggtgagacgaagctggagctgggagctcgaaagtgtcccccagctccctcctcactttgcctgtaactccacctctgcagaaggtaaagtagaattggtagctgtgtcactggtttgggttgagtcctcggtcagggccctctccagactggcgggaagggcgtggatcagcctctcccggaagtcctggcccatgaagacatagagcatggggttgaggcagctgttgaagaaggccagggcacttgtcacatccactgcaataccaatttctttgtacatgccttgcaataactcacggattctgactgtggctataagggccaccacctgatatggggaccagcagagaaaaaaggctgctgcgacaaaggagaggacccgtaagggacgactggacttaatcaagccttgcttgtggatcttggtggcaataagcccataactgacagcaacgatggacatgggtgcgctgaagccaatgatgaaccggatgatgcctctcaccgtcaacatggcaacggccacatttatcctctctttagggtcgttggtccagggcgaaaagttaaaagtgcaggctactgtccccgttttaccaggtactgtagtcacacgaatgataactggcaatgtgaggagcagagccatcacccagggcccaatgatcaccttcttggccaggctcacggtgcggtggttctgggtccagactggatgcaggacgcaaacacagcggtccagagcaatgagggcgatcaggaagacacttccgaacaagttgatgtccactatggtaaagacgaatttgcacaggaaccagccgaaaggccaatgtcctcccatggccttcctgaccatgaagaatggcaaagtggaggtgaaacagaagtcagccacggccaggttcaggtaactgatggtggtgactgtgtgtgtcatccggaatccagccacccagatcacaagcccgttgcccaggaccccgaggacaaaggtgactgcaaataccagataagtgatgatatccaggaagagatagccagcagatacagcaggtgtccctccagagatgttcgtggggagagaggaatttgtctccatcttgtctgctcctgaaatagtgcagtcgtggtcattcctcagttatgaacctccgtaccatttccccaccccctcatttctgcccctgccagttttcccactcctagctttctcaccttcccctagagctcccacaacagccggaacatcctcaccactgtcccttacacatgcccacatctatacattggcaatcttttattgtacctgttgggcaagattacatctttttttttttttttgagatggaatattgctctgtcacccaggctggagtgcagtggcgtgatctctcactgcaacctccacctcccgggttcaagcaattcccctgcctcagcgtcctgagtagctgagactacaggtatgcaccaccccactcctggctaattttcgtatatttagtagaggtggggttttgccatgttggccaggctggtcttgaactgctgaccccaggtgatccacccacctcagcctcccaaagtgctgggattacagacgtgagctaccacgtgtggccaagattgcatcttatgacacatcctcataattgctaacatgcaagcccctaccagggagattaaatggctaaggaagatagggtccttgacctccaagaggagaatatggggccaaagatgtatagagaaaacatgtattcaaacaaaaatgttcatagagacactcctccctatagccaaaaggtagaaacaacccagatgtccatcaacagatgaatggataaacaaaatgtggtttatccacccaatggaatattattctgccataaaaaacaatgaagcactgatatatgctacaacgtggctgaaccttgaaaacattactctaaacaaaagagggctggatgtggtggttcacgcctgtcatctcagagctttgggaagccgaggtaggagggttgcttgagctcaggagttcatgatcagcctgagccacatagcaagatcctcatctctaacaacaacaacaacaaaattaaattaaattagctggatgtggtggcacacacctgtagtcctagctactcagaagggtgagatgggaggctcacttgagcccaggaattcaaggttaatagtgtactatgattgagccactgcactccagcctgggcaacaaagcaagaccctgtctctaaaatgaaagaaaaaagaaaggaaggaaagaaggaggaaggaaggagagaaggaaggaagacaccacaagtcacattttgtatgattccacttgtatgaaatatccagagtagccaaactcacagagaccgaatgcagattagtgattgccagggactggggaaactaggaagtggggaattgttgcttaatgaatatgcagtttttgcttggtgtgattaaaaagttctggaactagataatggttatggttgcaacacactgtagatgtacttaatgccattgaattgtacatttaaatgggtaacttttttattgttgtttgagacgcagtctcgttctgtcacccaggctggagtgcagtggtgcgatcttggctcactgcaacctccgcctcccgcgtttaagtgattctcctgcctcagcctcctgagtagctggaattacaggcacttgccaccatgcccagctaatttttatatttttgtagagatggggtttcaccatgttggccagcctggtctcaaactccttgacctcaggtgatctgcccgcctcggcgtcccaaagtgctgagattataggcgtgagccactgtgcccagcctaaaatggttaactttttgtattttaccatcaatttaataaaggaaaaataagagcataagatatcagaaaatcagtgggcgacagcttcagtgacctagtgtcacacaaacgtggactaagactttctctcacccataacactgcataagaactataaggtatgcaacttctcagccaggcgcagtggctcacgcctgtaatcccagtaccttgggaggccgaggcgggtggatcatgaggttagcagttcgagaccagcctggccaacatggagaagccccatctctactaaaaatacaaaaattagccaggcatggcggtgggtgcttttagtcccagctactccagaggctgaggcaggagaatcacttgaacgtgggaggcggaggttgcagtgagcagagactgcgccattgcactccagcctgggcgacagagcgagactccgtttcaaaaaaaaaaaaaagatatgcaacttctccactccaaattctgctcgctctctctctttaaggtcatgaaatctccctttcctctctcatcgtgggaagcaaggcatagtacttggttagttttccaacataggtcaaatggatccgtgagtgatactaaacgacgtataatcaagtattatatccaatggattctgtgctagaagaagtcagaacaacagactctgtttccactctcgtctctgcggttaccttggccagatggatgggaggtgcttctccatccattggatgggctcagcactcttggggatgtagaagaccgtgatagaaataatagtccaaatatgtattggatatgacatttcattagatcaggtatgcaaagtgcatgtcaggttcttgctgagagctggccttctctcttttttttaatttattttattttatttatttatttattttgagatggagtctctctctatcacccaggctggagtgcagtggcgtgatctgagctcactgcaacctccgcctcccaggttcaagcaattctcctgtctcagcctcctgagtagctgggatttcaggtgcacgccgccgtgcctggctaatttttctttttaattgtattttagtagacatggggtttcaccatgttgcccaggctggtctcaaactcttgagctcaggcagtccacctgcctcagcctcccaaagtgctaggattacaggtgtgagccactgcgcccggcctggtcttctcttctaatgcttgcagcagccttcctcaaaattgttactatgagggtcactgtctttatggtacccattttgcagacgaggaaagtgcgacttagagcatttcagttaattccttaaagtcacccaacagcccaggctgtcgaattccagcaaaagtctctttctgcctctgccctgccacgctactggcacagaagagctgtctaatgcactagtcactcaccacatgtggttttcaagcacttgaattgtggctagtccaactggagacaggctgtaggagtaaaatacccatcagatttcaaagacttagtatgaaaaaaatattgtgaccatctcattaatagtttttatattgactacatgttaaaatgataataatttggctatttaagtttaggttagatattttattaaaattaagttcgcatgtttctcttcacctttttaaagtgcctacttgacactttgaaattacatatgtgtctcacatttctaatgaactttgatactctacaatctcagaaacaactcagagatgtctccctcccctaccacccatccaaccaccaaaataccctgaggactctttgtcctcaagaatctctaaggcaaccagttcagaagattgttgcaatgaatgatgaggattctgcaataatgagctggaacataccagagaggaaaacctgtgcaattttgtccaattatggttcaagggaaaaatcctgtgatttgcaatgaacacaggccttggtggctgccatcgatgaaggactttatgcttgataatcattgtaccacatcctcaactttcttgcctctgatctcaacaaactcagcattgattatacatcatcatccctgtgtgacggaagaggaaactaggagcttgatgagaaatgacagccaatgtctgcagattcatgagagggcagggctgtattccgctactgggtcctatgcaccatgcagaaccagtgtcttcacgtggagactcatcactgatccgaaaggtgactgcttctgtattacactcatttccccatgacccatcataaagtcgttagggctcttttgctttctcctgaaagcttcaaaccaaacatcctttcccatcccgactcaagccctcaagctgatgcccttgcctcttgctccaccagattctcctcctgctggctcctgcatcactgttctctgccctcatctctgtaaccagaaaacaagtgtttccatccaagaattaccctctactggtcccataaaactcattcccccatttactcaagaacttccctccttcacttatcccttctctctcctgcagcctcatagtgtctctatattccatcattcccatcaggaccccaataaagtctagagcctatttgtttatttatttatttacttatttatttgagatggagtctcactctgtcacctaggctggagtacagtggtgcaatctgagctcactgcaacctccacctcccagattcaagcaattctcctgcctcagcctcccaagtagcttgaattacagacgcccaccaccacgcctggctaatttttgtatttttaatagaagtgaggtttcaacatgttggccaggctggtctcgaactcctgacctcaagttatccacctgccttggcctcccaaagtgctgggattacaagcatgagtcaccgtgcccggcctgtttagaacctctttaaaaaaattattcttcaactccacatccttcttcaaacaaagagtctattgtgttcaccagtgtattaagtgtgtctatgtcaagctacccagtcccccagaatatgtttcttacctggactgttcaccagctgtggtcttgctctgggtagttctaggtctgggtctcctggggagagtgactcaggctctaatgattgcagcaaaacatacaccaaggaacaggaggaggggtaaaggaactaaaaccagctgggtagcaggaaataggaagtctgagcttcttctgatttttgatggccccaagaatacaccaatatactgtctgctttaatggcattaggacagtgggctgggcctgtttagaaactcatgtacctgactgtatttctcagcctcagtctctgtgggatgcagaggttcagtgctctcaacaacaagggccaagaaatccaagtgtccgggcccctgctccctccaagggtcaaggtaaagaaagcagcaagcactgtggtgagaagaatcagagggaggcaatgaaaggaagagaagaagtcatgagggatggagaccagaaacacagagagaggtaagggagtgggggaagttgagacagttggcaggacagcgcgtccacacccatgcacaccaccaagattaaccccataatcctctgatcttgtggaagctcatttgtagtcttctagcccaaagaaataaccgtttttctgaaatgttaagcatccttccaagggtatcagagtgatatggagaaatatggtaagacagttacagaatcagagataacgacactgattctaaaagcattattaccaaggcattgttgcattaagactgttttttcttttcttttagagacagtatcctgctacgttgcccaggcatgtctcagacccctgggtttagtgatcctcctgcctcagcctccccaaatgctgggattacaggcatgagccgggctgtttttaattctaagtaatttataatttacaattacacctaacaatggcttcaacaaggggtgtccaatcttttgccttccctgggccacactggaagaagaagaattgtcttgggccacacataaaatacactaacactaacgatacctgatgagctaaaaaaaaaaaaaaaaaaaaaaatcccccaaaaatctgataatgttttaagaaagtttatgaatttgtgttgggctgcattcaaagccatcttaggccatgggctggacaagcttagcttagaaccaagacgaaatttatggtttactttacaagaattttgcaagagggtaatactaggttaggttatatctggaaaatatcatcaagaactacattcattttaatcttttctcttttttatccctaatatggtgactttttttcctggggattgccacttcatggctccaagaaagctaccacagctcctgacttcacattacagcaggggtccccaacctccaggccatagaccaatacacagaccgataccggtctgtggcctgttaggaagtgggctgcacagcaggtgactggcaggtgagcaagagaagcttcatctgtatttatagccactccccattgctggcattactgcctgagctctgcctcctgtcagattagtggcggcattagattctcataacagtgtgaaccctactgtgaactgtgcatgccagggatctgggttgtgtgctccttatgagaatctaatgcctgatgatctgtcactgtctcccatcactcccagatgggactgtctagttgcgggaaagcaagctcagggctcccacggattctacatcattgtgagttgtataattatttcattgtgtattacaatgtaataataataatagaaataaagtctacaataaatgcaatgtgcttaaatcatcctgaaaccatctaccccgccaccccatggagaaattgttttttatgaaactggtccctggtgccaaaaatgttggggactgctacactccagcatcccacaccaggaggatggggatgagatggagaatcactgaagatctttaatcagaagggtgatatgttcatttgtactttataaacatttgtgtttgtattttataaacattttcttgggatcataacaacagatgcattttagaagattcccaaggtatgaagggtaacaaatgaagacgtgcctaggagtcacatggaagccaacactttgtaaggggattaaaataaagggaatggcagaggacatcattatgcacagaggagaagggcccaaatgtcaagagaaaacaagagacaagggactccacagagagtaattgccagaaaaatttgtaggtcttttgaagtctgactgttcttcctaaaacgggggtcctgggacacccctacctgtttcccatgagccctcttttctaaaacataagtaggttttcttcctggctaccaaatggcctgtgattagcacactaggttgggcaaaaatagagccaagtgtgtgttccaaagtgactatggtgaagaaaaaagcgaaagtcttaaaatggacttccacttctgtgtttgcgtaaggctaaaagggaagatgtcttagggttgaccggaatgggagtattcctgcctatgctgcaaaagtccctgactcttctggtaactgaaacatgagaaatggcctcggcgagcagcacagcctcccagtaaagcactggactgaggtggtaaagccagattgcctggactagaatcccaggactactgttcactagctccggacaagccagctaatccaggggtctcaaacatttcccccaactttttttttttgagacagagtctcactgtgtcacccaggctggagtacggtggtgtgatcttggctcactgcagttttgcctcctaggttcaagtgattcccctgcctcagcctctccagtagctgggattacaggtgcccgccaccacgcctggctaatttttgtattttttaagtagagatatggttttgccacgttgaccaggctggtcttgaactcctgacctcaaacaatcacttgccttggcctcccaaagtgctgggattacaggacggaaccactgcactgggccacaaacatttcctatgaagagccagatggtcaatatatttcatttggcaggccatagggtctccatcacaactccttggctctgctgttgtagcctgaaaacagccacaagcaaagttgtaaatgaggagcatgactgtatgtcaataaaactttatttaaaacacgacaattggacttcatataagttttgcatggcacaaaatacccttcatttgattttctttagccggtaagaaatattaaagccattcttggctctcaggccatacaaaaacaagcggtggctagatttgacccctgatttaactgcactgggtcccagacacttcacctgtgaattgagagcaatgatacttacagaggtgttttctggagcagaacaaataagatcagtgatacaaagcacttggcatgaattccagtgcaataagtattatcaatatcttagtaattacataaacctctctatctgctgtttcacgttctctgcggtgaacccatccatgcttaaaacttgaaccacacctcagctaacattcaccagacccctgtctctagctcagacctgcccttgatgttcagacacatcattttgggttcctgtttcctttcaaactcatctgcagcctttgctctcctcaccttctcccacaactctgttaaggactaaattgtgtcacattccccttcaaattcttaggttgaagccctcaccccatgatatggtttggctgtgtcccaaccctgatctcatcttgaattgtagctcccataattcccacgtgttgtgggaggaaccaggtgggagatagttgtttcatggggacgatttcccccataatgttctcatggtagtgaatatgtctcacgagatctgacgattttatgaggggtttcccctttcacttggttctcattctcttttgcctgctgccatgtaagatgtccctttgttcttccttcgccttccgcaatgattgcgaggcctccccagccacatggaactgtgagtccattaaacctcttccctttataaattacccagtcttgggtatgtcattattagcagcatgagaattgaccaatacaccccagcatgtcagaatgtgactgtatttggggatacaacctttaaagaggtaattagctgaaactgaggtcattagggtgggccccaactcaatatgactgatatccttatgaaaagaggagatccagacacagacaggcatagagggaaaactgtgtgaaaacatgaggaggaggcggtatctgcaagccaaggagagaggactcaggaggaatcaaccctgctgacaccttgatcttaaacttccagctgataaaactgtgagaaaatatatttctattgttgtagccacccagccaatggtattttgttatggcagctctaacaaactaaacactctgcttcttttcattgactctcgtctcaatgacagcccccaaatccacgcagttaccttggtgcaacagttctgaagaaaatggccacaatattcttggacactccttccactgacaggaaggcaggcatattgtatcgcctctcccctggaacctgggtagggttgggactactttgaccaaagaacgtggtagaaatgacttccacgtagctttcaaggctaggtcaaaaaaggctaggaagcatcttctggttctcctgggacacgtgttctggaggaaggcagccattgtcctgggactttgattcctctgagaccaccatgctggaaaggctgcctgtaggcacttggtgcaataccagcctagttcagcatttgagtcattccaacccaggcatctgacatgtgaatgaaggagctctagatgactccaattcacagtcttctagtcaccccccagacctttgagttttgggtggcagagacaagcatctctgtgccttatcctaattcccaacccacataatccatgaacgtaatgaaatggttgttttacatgctatgatttgggtggttatacagcaattatgaattatgaatgtgggcttcataaagacccttcatgcttcctcattctccagagccatttggtctccaagctcagtctaccaagcctggaaatctctccctaaactacacctcctctctagcacactactccagcacaggcaattattcgacaagttcaccttgatctctggcaacttcttaccctttaagatctctgcctccaactgggagcattctcagagccatccctttgcagggggactctagagcaatgttttctggaagcacacacctgacaagtcactctcctgcttaaatagcttttaagcagaagaaattgtaagaaagaaatttttttttagaccaatatccttgatgaacattgctgcaaaaatcctcaataaaatactgacaaaccaaatccagcagcacatcaaaaagcttatccaccacgaccaagtgggcttcatccctgggatgcaaggctggttcaatatacgcaaatcaataaatgtaatccagcatataaacagaaccaaagacaaaaaccacatgattatctcaatagatgcagaaaaggcctttgacaaaattcaacaacccttcatgctaaaaactctcaataaattgggtattgatgggacgtatctcaaaataataagagctatctatgacaaacccacagccaatatcatactgaatgggcaaaaactagaagcattccctttgaaaactggcacaagacagggatgtcctctctcaccactcctattcaacatagtgttagaagttctggccagggcaattaggcaggagaaggaaataaagggtattcaattaggaaaagaggaagtcaaattgtccctgtctgcagatgacatgatggtatatctagaaaaccccattgtctcagcccaaaatctccttaagctgataagcaacttcagcaaagtctcaggatacaaaatcaatgtacaaaaatcacaagcattcttatacaccaataacagacaaacagagagccaaatcatgagtgaactctcattcacaattgcttcaaagagaataaaatacttaggaatccaacttacaagggacgtgaaggacctcttcaaggagaactacaaaccactgctcaatgaaataaaagaggacacaaacaaatggaagaacattccatgctcatgggtaggaagaatcaatatcgtgaaaatggccatactgcccaaggtaatttacagattcactgccatccccatcaagctaccaatgactttcttcacagaattggaaaaaactactttaaagttcatatggaaccaaaaaagagcccgcattgccaagtcaatcctaagccaaaagaacaaagctggaggcatcacgctacctgacttcaaactatactacaaggctacagtaaccaaaacagcatggtactggtaccaaaacagagatatagatcaatggaacagaacagagccctcagaaataacgccgcatatctacaactatctgatctttgacaaacctgagaaaaacaagcaatggggaaaggattccctatttaataaatggtgctgggaaaactggctagccatatgtagaaagctgaaactggatcccttccttacaccttatacaaaaattaattcaagatggattaaagacttaaatgttagacctaaaaccataaaaaccctagaagaaaacctaggcattaccattcaggacataggcatgggcaaggacttcatgtctaaaacaccaaaagcaatggcaacaaaagccaaaattgacaaatgggatctaattaaactaaagagcttctgcacagcaaaagaaactaccatcagagtgaacaggcaacctacaaaatgggaaaaagttttcacaacctactcatctgacaaacggctaatatccagaatctacaatgaactcaaacaaatttacaagaaaaaaacaaaaaactctatcaaaaagtgggcaaaggatatgaacagacacttctcaaaagaagacatttatgcagccaaaagacacatgaaaaaatgctcatcatcactggccatcagagaaatgcaaatcaaaaccacaatgagataccatctcacaccagttagaatggcaatcattaaaaagtcaggaaaaaacaggtgctggaaaggggagaaataggaacacttttacactgttggtgggactgtaaactagttcaaccattgtggaagtcagtgtggtgattcctcagggatctagaactagaaataccatttgacccagccatcccattactgggtatatacccaaaggactataaatcatgctgctgtaaagacacatgcacacgtatgtttattgcagcactattcacaatagcaaagacttggaaccaacccaaatgtccaacaatgatagactggattaagaaaatgtggcacatatacaccatggaatactatgcagccataaaaaatgatgagttcatgtcctttgtagggacatggatgaaattggaaatcatcattctcagtaaactatcacaaggacaaaaaaccaaacaccgcatgttctcactcatagatgggaattgaacaatgaggaaacatggacacaggaaggggaacatcacactctggggactgttgtggggtggggggaggggggagggatagcattgggagatatacctaatgctaaatgacgagttaatgggtgcagcacaccagcatggcacatgtatacatatgtaactaacctgcacattgtgcacatgtaccctaaaacttaaagtataataataaaaatatatatatatataagaaagaaattttaagaagaaattctaagttctttttacagcattcaagaccaaccaagaaattgcctctgccgccctctacatacttaatgcttattgctgtctgccttatcatctatgctctggtaaacaaaagtaacctgcttttttgtgacccctttcgtgggtatttttactcccctctgacaagaatgcattattttttctcctttatctgagtctttaagactcagcctacatgttccctcctccggatattgactctagatccgtgaatctgagttagtggttccttttagaggacctcacaaggagccaggcatctgtctatcactacgtgcccccaccctattgtaactaagcactgcattctcacctctctattcaggtggtccgcagagcccatgtctgattgatctctatgtctccagcagccagcaaggaagcacctctttagagacctgcacctatacaatacctaccaccttttatttctcgatatgtgaactccattgagaacaaacgagtaaatgtaggtaatgtgccttcttcttttcttttcttttctttttttttttagatggagtctcgctctgttgcccaggctggagtttagtggcacaatctcggctcactgtaacctccgcctcccaggttcaagcgattctgccgcctcagcctaccaagtagttgggattacaggtgcccaccaccacgcccagctaattttttttgtatttttagtagaggtggggtttcatgatgttggctaggatggttttcaactcctgacctcaagtgatccacccacctcggcctcccaaagtgctaggattacaggtgtgagccacagcgcccagccagtaatgtgccttcttaagttctgtgagccattctaacaaattatcagaacagaggaaggggttataaacatccccccacccccgatttatagccagtcagtcagaagtacaggtggccacctgggacttggattggtgtctgaagtgaggacagttttgggagagtgagccctttaacttgtgggatctgacactaactccaggtagacagcgtcggagctgaattgaattgtgagatacccagtggtgtccccagagaactggagaattgcttgatatggaaaagacccacacatttgatgccagaagtactgcataagtcgagaattgagtttgacttaatcatcatatttgggcttgattgcgtggctgaaactcttcccacttcagtaattgtttctttcattttcatgaaactctgaagaaggaagggctggacattcagattccttgacccttgacatttggaagcatgaactccagtctctcacagaaggctagaggtgaaggaacattcagacacattggtttctaagaagagtccgctgacaacatacccaaggtgtcttctgaaaattataagaaatcctgagtttctgttaggggattggctccagctccattgtccctcccccatcattcagtagtctccgcgaaagcccttagagccggtgttgctccacaggaagccaagaagcacacaggaaaaggagcttagctgctggtaagttggggactgacaatttaaaatttatcaatggaactcctgctctctgacaaacacctcctaaattctagagcagtgctgtaatggagcatccacttgccacaggtggcttttgagtgcctatgtttctatcttgatctgaaatgtgcttaagtgtaaaatatacttagtgtagtttaatcattagtatgatcaaaataatacaatttatctcgttaataactttcattttggtaacgtgttccaatgattttttttatttgcggggttaaatgaaacatattattataattaatttctcccaatgattttacttttttaacatggctactagaaagttgtaagtcacgtgtgtggctggcatttagggcttgcattaccctgtctctactaaaaatgcaaacaacaaactagccaggcgtagtggtgggagcctgtaatcccagctactcaggaggctgaggcaggagaatcgcttgaacctaggaggccgaggttgcagtgagccgatatcgtgccattgcactccagcctgggcaagaagagtgaaactctaactcaaagataaataaacatgtgaaggagccaagtgtgaggagcttaagaggaagagcatggtaggcagaaggaacagagaaggcagaagccccgagatgacaatgagctgcatgttcaaggaatcagagcccgttatgggtggagcccagtgtgtcccacgagagtgcagagatgaggtctgaggaatgcacagggcaggtccaggggtacttgagggaacttaagataaggataagttagaagtttggaagccattagaaggtgttgaaaatagcatcaccattttattggaccttttttttttttttttttgagacagaatcttgctctgtcgcccaggctgaagtgcagtggcgcagtctcggctcactgcaaactctgcctctcagggtcaagcgattctcctgcctcagcctcccaagtagctgggattacaggcacccgccatcacgcccagctaatttttgtgtttttttagtagagacggggtttcatcatgttgggcaggttggtcttgaactcctgacctcaggtgatccacccacctcagcctcccaaagtgctgggattacaggcatgagccactcccggcccttattggactttttttttttttttgagacagagttttgctcttgttgcccaggctggagtgcaatggcacgatctcagctcactgcaacctccgcctccctggttcaagcgattctcctgcgtcagcctcccgagcatctggaattacaggcacgtgccaccacgcccagctaattttgtatttttagtagagatggggtttcttcatgttggccaggttggtctcgaactcctgacctctggtgacccacctgcctcggcctcccaaagtgctgggattacaggtgtgagccactgcacctggcccttattgaactttttaaaagctcatttggtttccttctggagattggattgtagggcaggggaaagtaggaccaggaacaacctatttgcaaagttggcgcaaacattcctgcctgacaggaccatggacacaggttgtagagatagagatggctctggctgtgcattcagcagattctgtagatagaattaataggacttggatgggattgtggtgagagaaagtgaaatgaaagataagttctagtttggaagttttaacaactgaatgtttaaactcaaatagacacaaaatattggaagagtggcaggtttgggaggatgagacaatcaactgtttggttgagccacgttaggtttgaaatgtctacgggactcccgtggggagaggttatatcagactggagcaccagagagaggccaaggctgatagtttagatgaaaagagagcatgatattttaagccctgagactggataatatcacctatagaaagactatatagagataagagaggtggggaacaagtaaaagctgcgggacactcctaaatttagagtcaaatttagagcagaaaatactagcaaaggggactgaaaagcggtggccaattgagcttcaaatgcaagtgaaagtgtgttgtgtgtacatttatcatctcatggcacaggaaaaacgtgatttaaggagaaggaagcgatccaatgggaagaagagatccaatggatcctctatcacgaagatattgagataagaaccaatatggatttgcacccactgcatttgcagccttgaggtcataagcatcctcaggaaaatgcaccaggtcagtgctaaggactggagtcaatacagactggattcaggagaaaaagtgaggcagggaatcaaagggagcaaacacagaaaactccttccaaaatctggctgcaaattcttttcatagaaagaattctctcaggagaaatagggttaacaccagaaaggaatatagtccaagatctttttggttgttttttgttttgttttttggggtggtttttattttgtttttgtttagttttgttgttgtttgtttgtttgtttttgagacggagtcactgttgcccaggctggagtgcagtggtgcgatctcagctcactgcaacctccgccttccggtgttcaagaggtcttcctgcctcagcttcccaagtagctgggattgcaagcgcgtgccatcacgtccagctaatttttgtatttttagtagagatgaggtttcaccatgttggccagtctggtctcaaactcctggcctcaagtgatccacttgcctcagcttccctaaatgttgggattacaggtgtgagccacggcacctggccaaggatggtttctttttaaagggaggggatatgatttatgtaatgtttatgtaatagtgagaatgatctagtagaaataaaatcttgagggtttgtttttggcagaaaatggaaggacaaatgcagggggaaagtttgtgggaagatgagagggcatcctgggccaatgcagggagggaaattattggaaagaacaagaagtctttattcacagtgacagaggcaggtagactgagggtcaggggaggaccggctgaaaatttcacatctagttattaccattttctcattataatgtcagtcaagggcatctgctgagagtgggaaaaacagagtaaatgaggtactttttggagaaagcaggactgaaataattaaggtgtgggatagcgagtgcgctggagaagtagagtaacctaatgaggaactgctgagttttcatttgaaatctgtggtcataaattcaattgcaaccctcgataattgtgaaagtcacttccgctctctgagccgtactttcctacctgttacacaaggacagcacttgtcccaaagcaagggtattgtaatcagagatgataaaatatatagtgactggcacatattaaggactcaccaaatagcagacctcataatcagtacaggtatcatctgtggttcgcagttctcctccttacattacaactagggtggacccaaaactttgcaatttttgccttgttaatttgtcctcacctgtcattgcacaatcatccttccttgttgcatcaacatttttttttttctgagacagagtctcgctctttcacccaggctggagtgctgtggcacgatcttggctcactgcaacctctgcctcccagactcaagtgattctcctgcctcagcctcccaagtaactgggattacaggcacccaccaccatgcccagctaatttttgtatttttagtagagacagggtttcaccatgttggccaggctggtttcaaattcctggcctcaagtgatccacctgtcttggcctcccaaagtgctaggattacaggcgtgagccactgcgcccagcctgtatcaacattttaaaatgaatttgaaattatggatagatcatgtcttctaagtgtcttgtagaatgtttggagtgtggatagagaaaatctgagtctgttgaggaactatggggtggaaaagggttaacagcacaattctgttgtaatcaatctggctgagctccaattctgtctctactctttctacctggtaacgttgaacaattaacgcagcccatctaagtcttaacttcctcatctgtacaatggttatactaattatcaggctgctgcaaaagtacttgtggtttttgatattattttcaatggcaaaaacagcgttacttttgcaccaacctaatatcactaagattaatcaatattcactgtgtctcaggagtgctcagtgttcacacatattaacacagcccatccacagatcctgtgagaggcgttgatagggttaaaggaaaagctcttggtgtgtgggtaatgttcataagtagaaacaactattgctatgagcatcgttcttgtcctgaccttgaacttcataatggattgagccccacgacacagcacacagcctggtgagggccaagagttcccatttgtcatagatatactcagtctagcctaaaagatttccacatctattctcacttaatcctcacctgaaagttagacttcaccataaaattgtcctcgttctgcagagcagaaaactgaggctcaaagagatatcactgactaaaaactcatagtgaggagacatcacagatgagattagaagagagatgtagctgacttcagagcccagtatatatatatattttagacagagtctcgctctgtcccccaggctggagtgcagtggcacggctcactgcaacctccgcctcccgggttcaagcgattctcctgcctcagcctcccgagtagctgggactgcaagtgcatgccaccaggcccggctaattttttgtattttcggtagagacggggcttcaccgtattgcccagggtggtctggaactcctgacctcaggcaatccaccccccttggcctcccaaagtgttgggattacaggcgtgagccaccgtatctggctgagcccagtattctttgtaacagtgactctcaattgggggtgactttgcctccgaggggacctttgacaatgtttatggaacctgttgattgtcatttctggagaaggagttgctactggtgtctgtggatagaggccaggggggctgctcaacatcctactgtgtccagaacagtctgccacaacgaagaattacccagacccagatgtcaaaggtgccaaggttgagaaaccctgagctacattaaataacgtcccatggaatacctcagtgaaactcactggtaatagcaggaagaaaaggaggaaataaggaaaaggaagaaggctaaaaatcaccagactgaggcatagccctatcctagtaatcttgggggaatccctttcaaaggcaggacttccgtatgcaaaggcagtggctctggagttgttcatctcggtttccgtatcttgctgcctccactgactggctgggcatgatgttgaaaaaaactacagaagtccccgggccatgaattcccccagatgtgatggctgtttcccaatgttattatgagcattagatgtgaacaagtgctatggaattgctatttctcttaaagatgctgaatagcccagtctgagatgattctcaaattctcatggccatagcaaatcatcctggcttttacacatacagattctagaatgagatttatggatataattgtttttcatttttattataagttcaggggtatatgtgcaggtttgttatacaggtaaacttgtatcctggtgttttcttgtacagattatttcatcactgagatattaagcctaatacccactacttatttttcctgatcctgtccctcccctcaccctccaccttccggtaggccccagtgttcccctctttgtgtccatgtgttctcatcatttacctcccatttgtaaatgagaacatgtggtatttggttttctgttcctgcattagtttgctaaggataatgaatacaattttaacaggcagcctggatgtttctgataaagtccacagaccacggcataagaaaatgtgctcaggtgacgtgggactttgtgttgaactggatacaaatattacagatgtgatccggaccagaggcagggactacatgttttgggtttttgttcttaaaagaaaaaaacaaaaacaaaaaaacttgatctgagaagctctgaagggtcatattcttacaatgttattgtccacaatttagtcacgtgtccactaccaaagcaatcccttgcaaagtaaaagggattctggttagtgctaattagactagtcaggatttactcccaacatggagaaaagacaccttctctgcagggtgagtaactaaacacaattgtggtttttcaagcagagaagaatggggaaccgttgctgggtgggcaaccagcaatatctgtcaagcgtaagggtttagaagtcagaccatgccaaactgaagtcctgaatctattatctactacctaagtgaccttcaacacatttcacaattgccctgagctttcatttattctaatgaaaactagaagtaatgaatattacatagctattacataggccaaaccggatcccatatgtagtaattaacacaatgcatagtctctaataagaacttcacaagtattaatacaacttattattcttatagtctttatcccacagacaccaaagctatacaaatcggcactgattatttgcattccaaacagagaagagctccacatcaagcagggacagggaaaagcagagggtagaaagcagagatggaactctctttgctgacttcctctagtgcagaatcctcaggatataacatactactacatgttaccagtgactcctcaaaattctcttcaacaataacctcaagccaaaccctcaaactttatcttgagtactagccaagcaataggtcaagggttctcacagtttgagggacaggagttgggagactggaagaacctggggctgaaagagattgcagagcttgccagcatgtttgcattgaatggtgggagacacagatgtgagccttctgattctgagtcatgtgccttcctcacaatgctgaggctgcctatgctcaattttccattgtccatacaacataagttcagtatgagccttgtaatcctcttggtgaagtgatcagcccgataagcgaaatgcatattgataatgatgggaatatggaggactatcccttcccaaaggagcatccaagagaatgccaattctatagcaccgttgtcaacaaggcttggtagatagagtgggtctcctggtaggagtgggagctttagtggaagttgatgtgagctataaatacagatgctgtaagatggttccacagctgagaaatggccattgttggaatgtttcaggtgctgctggcaagatggaaaccaacttctccactcctctgaatgaatatgaagaagtgtcctatgagtctgctggctacactgttctgcggatcctcccattggtggtgcttggggtcacctttgtcctcggggtcctgggcaatgggcttgtgatctgggtggctggattccggatgacacgcacagtcaccaccatctgttacctgaacctggccctggctgacttttctttcacggccacattaccattcctcattgtctccatggccatgggagaaaaatggccttttggctggttcctgtgtaagttaattcacatcgtggtggacatcaacctctttggaagtgtcttcttgattggtttcattgcactggaccgctgcatttgtgtcctgcatccagtctgggcccagaaccaccgcactgtgagtctggccatgaaggtgatcgtcggaccttggattcttgctctagtccttaccttgccagttttcctctttttgactacagtaactattccaaatggggacacatactgtactttcaactttgcatcctggggtggcacccctgaggagaggctgaaggtggccattaccatgctgacagccagagggattatccggtttgtcattggctttagcttgccgatgtccattgttgccatctgctatgggctcattgcagccaagatccacaaaaagggcatgattaaatccagccgtcccttacgggtcctcactgctgtggtggcttctttcttcatctgttggtttccctttcaactggttgcccttctgggcaccgtctggctcaaagagatgttgttctatggcaagtacaaaatcattgacatcctggttaacccaacgagctccctggccttcttcaacagctgcctcaaccccatgctttacgtctttgtgggccaagacttccgagagagactgatccactccctgcccaccagtctggagagggccctgtctgaggactcagccccaactaatgacacggctgccaattctgcttcacctcctgcagagactgagttacaggcaatgtgaggatggggtcagggatattttgagttctgttcatcctaccctaatgccagttccagcttcatctacccttgagtcatattgaggcattcaaggatgcacagctcaagtatttattcaggaaaaatgcttttgtgtccctgatttggggctaagaaatagacagtcaggctactaaaatattagtgttattttttgttttttgacttctgcctataccctggggtaagtggagttgggaaatacaagaagagaaagaccagtggggatttgtaagacttagatgagatagcgcataataaggggaagactttaaagtataaagtaaaatgtttgctgtaggttttttatagctattaaaaaaaatcagattatggaagttttcttctatttttagtttgctaagagttttctgtttctttttcttacatcatgagtggactttgcattttatcaaatgcattttctacatgtattaagatggtcatattattcttcttcttttatgtaaatcattataaataatgttcattaagttctgaatgttaaactactcttgaattcctggaataaaccacacttagtcctgatgtactttaaatatttatatctcacaggagttggttagaatttctgtgtttatgtttatatactgttatttcactttttctactatccttgctaagttttcatagaaaataaggaacaaagagaaacttgtaatggtctctgaaaaggaattgagaagtaattcctctgattctgttttctggtgttatatctttattaaatattcagaaaaattcaccagtgaagccaacttggtcttgtgttttctttctgggaagatttttaataacaagtttgttttctttaacagtgattagactcttctgttttttggttttttgttttttcctatctgtcagttttggtaaactgaatttcaaggagtttggccatttcattcaaactgtcaaactcatcggcataaaatagtataataactgtttaaaagttataaaacagcatgaaacttggctgggtgcggtggctcatgcctgtaatccaagcactttgggaggccaagaagggtggatcacctgaggtcaggagtttgagaccagcctggccaacatggtaaaaccccatctctacttaaaatacaaaaattagctgggcatggtggtgcacacctgtaatcccagctacttaggaggctgaggcaggagaattgcttgaacccgggaggtggaggttgcagtgagccaagactgtgccattgcactccagcctaggggacaagagtgagactttgtctgaaaaaaaaaaagtatgaaacttgaaatgctttcttttatgtatttattaatttctgatttttgttcttcttgttgttattatcctagagcacagcctttggagatacagtttcttttaaacaacgaaaatgtaagctctctgaagtcagggattttggtctgtatggtttgctgattgaaccccatcctctatgtgtaaaatactgtctgatatgtaatagacattcattaaatactcattgaataaatgaatcaataaacaatagtatcacctaggtgtcaagtgagaagttttaatgtcaaatcaaaattatctccaacccttattacatgaaccagaccatgtccagtaaacacccatcctcaagcacacaatatttagaaatactcatgtggcttactttttcatcaatttctggttttgagcttctgctttaaggaaagtaccatggctaactgttgcctcacgcctttgttttgaaataaatcaacccacaaaggtactcagccctttactttgcttacaggaaatgaccactcagaaatggtccttcggtgcggaacatactttccggatgcactggcaaaagacagaactctacacgaatatgaggcagtcctgttatcagcgtcctcactcactccaccgcttctccctttccctcctgtttcccctaaagttatttacatttccaacatttccaaaacagagaagtttacttagttcatttgcattcttgactcctataaatgctttccagttcctaagaaaagtataccctttaatgcccgactaagttgtggccatagaaaataaggaacaaagagaaaacgcaagaaggagaaacctggagccaagaacagcatatgaccttgaaacaggagaaccacggcttctagactggctagttaacagccttcctccactgccaggacagaggagtcttactttccttcccactggccttggttaattgcactggaacagtgcctgctgcatcctccccatttttcttttcttcattggaagttgccattgtggattctcagttccaattgcacccttgtgtactggggtcttcagaagctgaggattcttggtgtttatgggacattcaccaccaataaacatttctagacttgctcgaatctggaagtccaaaataaaactctggggatagtgtccatgggaagaacaggaccactttttctgtttggggagaagagtgtagagactgttgagtacccaaaggcgtaagctcccctggagactgccagctgcctacccaatattcttccccctactttattaacaaatgtgggcagcaattcattcagctaaaataatccttttctcagtcatccttccagctaggtgtgggtaaattctaggcagtaagatacaaaaatagtatcacattagtacataaggggctgcctcattattttattaacatagtgtttattgattgattgattgattgattgagacaggttttcactctgtcacccaggctggagtgcagtggcactaatcacggctcattgcagccttgacttcccaggcttaggtggttctcccacctcagcctcttgagtagctgagactgcaggcttgtgccatcatgcccagctaatttttgtattttttgtaaagacagggtttcaccaagttgcccaggctggtcttgaactcctgagctcaagcaatgctcctgccttaccctcctaaagtgctgggattataggcatgagccactgtacgtggcctagagtttattttttagggcaattttagattcatagcaaattgggaagaaaatacagagatttcccataaacccactgcccctacacatgcacaacccctctcattatcaacatccccgaccacagtaatatatttcttacagttgatagacctacgcagatacatcattaatccaaagcccacagtttacattagggttcattcttggtgttttactttcagcgggtgatatggttaggctttgtgtccccacccagatctcaccttgaattgtaatccccataatccccacgtgtcaagggagacaccaggtggcggtaattgaatcacgggggcagttccatgatggtcttgtggtagtgagtgagttctcatgagatcttgatggtttcataagcggctcttcccccttcactgggcacttctccttcctgctgtcttgtgaagaaggtggcttgtttccccttccccttctgccatgattgtaaaagtttcccgtggcttccccagccatgctgaactctgagtcaattaaacctctttcctttataaattacccagtctcaggcagttctttacagcagtatgaaaacagactgtccaggtacggtggctcatgcctgtaatcccagcactttggggggccgagatgggcggatcacaaagtcaggagatcgagaccatcctggctaacacggtgaaaccccgtctctactaaaaatacaaaaaatgagccgggcgtggtggcgggcacctgtagtcccagctactcgggaggctgaggcaggaaaatggcgcgaacccgggaggcggagcttgcagtgagccgagatcgcgccactgcactccagcctgggcgacagtgggagactccatctcaaaaaaaaaagaaaaaagaaaacagactaatacagtgggtttggacaaaagtataatgacttgtattcaccattacagtatcatacagactcgtttcattgccctaaaaattttctatgccctgcctattcacccctacctcctccctatcccctggaaaccactgatattttcattgtctttatagttttttcctgttccaggatgtcatatagtagaaatcatgaagtatgtagccttttacgattggcatctgtcatttagtaggatgcatttaaagtttcctccatgtcttttcatagactgatagctcattactttttagcattgaataatgtccactgtctggatgtaccatcatttatttatccattcacctactgaaaaacatcttggttgcttcccaattggacaattataaataaagctgctataaacatccatgtgcaggtttttgtgtggacagaagtttataacttgtttggataaataccaaagaacatgattgctggattgtatggtaagcatatgtttagttgcatgggaaactgccaaactctcttccaaggtggctgtatcattttgcattcccaccaataatgaatgaggatgttccatgtctttgccagcatttggttgtgtcagtgttctggattttggccatttctaataggtgtagggtggtatctcactgttttaacttgcatttccctgatgatatatgatgtgtatcaccctctcatatgttaacctggcatctgtatatcttctttcttgaggtgcctgttaagggcttggcccatttttaaaatgggctttctgtgtccttattgttgagttttaggagttctttgaatattttggataacagtcctttatctgatatgtctcctgcaacactctcccatagagcagattttttttttttttagatttttttttttttgagacagagtctcactctgtcacccacactggagtgcagtggcaccatcacagctcacagcagcctcaacctcacggactcaagtgatccccccacttcatcctcccaagtagctaggactgcaggtatgcaccactatgcccagctaatcatttattttctgtagaaatgggggtctcactttgttgcctaggctggtctcaaattcctgggctcaagtgatcctcccacctcagcctcccaaagtgctgggattacaggtgtgagccaccatgcccagccagaaattttcaattttaataagaattgccttcttgattctttctttcacggattatatcttttgttttgtaattacaaagtcattgtcaaaccaaacgtcatctagattttctcctatgttatcttctaggtgttttatagttttgtcttttacatttaggtctgcgatccattttaagttaattttagcaaagcatgtaaggtctgtttctaaagttacttttttgcacatggatgtctagtcattccagaaccatttgttgaaaagactatcttttctccattgaattgcctttgctcctttgataaagatcacttgacaatattaatgtgagtctatttctgggctctcttattcagttccattgatctatttgtctgttcttttgcctgtagtacactgtcttggttactgtagctttacagtatgtcttgaaatcagatggtgtcagtcctccaactttgctcttcttgttcaatattatgttggctatactgggtcttttccctgtccatgtaaactttagaatcagtttgttatatccacagaataaattgctggaatttttattgggattgtactgaatccaaagatcaaattgaggaaaactgacatcttgacaatcttgaatcttcctagccctgtacatggactatctctcaatttcttcagttcttctataatttctttcatcagagtgttgtagtttttctcatatagatcttgtacatattttgttagatttttactcagtgtttcatttctgagggacataatgtaaatagtattgtgtttttaatttcaaattccatttgctcactgttggtatctaggaaagtgattgatttttttgtactctgcaaccctgctataatcacttattacttccaggaatgtttgttatccaatcttttggattttctgcatagatgatcatgtcagttgtgaacaaaatagtttttttttcttcctttccaatatgcatacctttttagtttgtttttaattgaattagctaagacttcagcaatgctgaaaaccaatatgagagaagacgtccttgccttgttcctggccttactgggaaagcgtcaagtttcccactgttaagtataatgttagctgtaggattttttgtaggcattgtttatcagattgaggaagttcctctttattcccaggttactgagcatttttaaaaattatgaatgagtgttgaattttgtcaaatactttttctgcttctactgatataactatgtggttttttcattagtctgttgatgtaattgattacattaattaatttttgaaatttgaactagacttgcatacctggcatgaataatttttatactttgttttatacattacattatagtagtttagacatttttgggtttgatttcctaatatgtttttgagaatttttgcatctatgttcatgagagttattggtctgtagttttgttttcttgtaatgtctttaaatggatttggttattagggtgatcgtggatttatcatgagttagaaagtcctccttctgtgtctgtattctcaaagttcctcattctttttaatttttgcattgtattttattggatgaatgtaacaaaatttaatctgaccaaattgcttttgatcttttgctcattacaaaaaaaaagctacaatgaatacctgtgcacacacacattcctttgcatgactgtgtgtttgtctatagaaaaaaattacaatagtttgtaacctaagtgtctatcaacagatgaatgaacaaaaaaaaattgttcatatacataatggagtactattctgccatgaaaaataatgagactctgtcatttgcaacaacatggatggaactggaggtcattatgttaagtgaaatggatcaggcacagaaagacaaactttgtatgttctcacttatttgtgggagctaaaaatcaaaacaattgaactcatggagatagagaatagaaggatggttaccagaaattgggaagggtggcaggagtcgggggagaagtggggatggttaatgcgtacaaaaagaacagaaagaatgaatgaaacctagtattcaaaggcacaatagagtgaatatagtcaatgataagttaattatatattttttaaaaactaaaagagtataactggattctttataatccaaaggacgaatatttgagggaatggatactctattttctatgatgtgattattacacattgcatgcctgatatcaaagtatctcatgtaccccataaatatatacaactactatgtactatgtaccgacaaaaattaaaaattaaaaaaagtaatactaaaaaagatcgtttgtaatttagttgatttctctgctcttatctactatcagagctataaagcccattgccacatcttaggaagacaacttttctgaaaaacaaatagtgatctatttcttgacatgagtgggagtacatgagcattttgttttacacaaatatattaatcttcacgtttatctttttctcattgtgtgtgtttgtgtgtggggtggttgttatagtccacattttaaaagctaagagaaataagtcagctggatgtagcggctcatgcctgtaaccccaccactttgggaggccgaggtgggcgaattgcttgggcccaggagttcgagaccagcctgggaaacatagtgagacctcgtctctactgaaaatacaaaaattacctgggcttggtggtgcgtgcctgtagatccagctgaaggactggggctgaggtgggaggatagcttgagcccgggaggcgaaggcggcagtgagctatgattgtggcactgcactccagcctgggtgacacagcgagaccttgtttcaaataaaagaggaaaaaacgaaaaataagtcaatcgaattcgggtccccttttctttataccagtaaagcttcatagctcctgaaattaggctgcttgaagcaggacacctttcatataggtgctgcaattctctaaattcatacttgctaggacagggagggtcaaaggcagcaggaggaagccatccccggcatgactggctcgggtctcctgggctcgtgaaaacgaactcattagacatcgagctccctcttgtggcagctaaaagaaaacacaaggaaatgcaactcttgcttcactcagttctgtgaccgcattgggagataacccttggaaagcttgattatttgtgggctagctcgcccagaatacatttctaagcacatctgtacaagtaactttgttctttcaatgcagaaagtccccttcattccaaaatgtacattccagagacggtggaggctagagatctctcctgtatctcatcccattctatgagttaccagtgccattagacgaaagaaagtccatgtaaatgcttaggatgctggcgactgttcaactgtgattccattctatctttccatctcatgcctcctgcggctccaaacaccatctagttaactgcgtcccgaatgttgacctacactgatgctgtttcatcagagtcaattggggaggtgtttgtttgtttgtttgtttgttttaatatgggttaggtcactgcaacatcaaagcatcttgatttataaagtttggagcagagcacaataatctgtgtttaatcacagattaactttgttccctttaggtattccctggtaaattgtaatgtgcaatcagattcccctgttttctttttttgttttgttttgtttttgagtcagggtcttgctctatggtcaaggctggagtgcagtggtgcaatcatagctcactgaagcctcaacctcaccagctcaagcgatcatcccacctctgtctcccgagtaggtgggaccacaggaacatgccaccacacggggcttatttctgtgtgagccactgcgcccagcaatgattcccctgctttctagcagttgaataaatactcttttaactagaggacataataagaactaatattagaccatgagaattagaactaatattacctcttggaaacacggatatatctttatggtccacaccatagaacaaatggtcttttttatatgcggtggtaacacagccattgggagggaaacatggggagaagtcctagttaggaaagcaaatttggagagtgaggctgtgatcgtgaaatcacaggtgtggacaagctaagctgtcaatactttgttcttctgaaagaagaggttctcagcaacagtgaacagaattaataatttatcagaaaaaagtcccccatgccctttacacctcaattcttaccacaaatagcaaaccaactaaatctggatctgatttttgtatgtacacacaaagcacataacagttactgagaaacacagtgaaagaggaaggacaacctctgatacaaaaagagccaatatcgcctccaaaaactatgtcccttactctccctccctcaggtcctaacactaacttcctgtcccaatttgtagggaagtaggtgctcaatggttcctcttgcccagtgtgttctcttccagttgaaatggcaatctaggcataaagtttggaagatagagtcaaagaattaactactaatgatggagattttgtgagacccacacagagttgggaggcttgctggttgataaaactcctggcaattcataatgtttcacctattctaagtcacacttgagctaatattataccaggttgtccctgtgttagttatctattgctgcaggcaaatcaccctcaaaacatggcttaaaacaatagtaatctaatttactatctgttacaatttctctgggtcaggaatttggaagtttctggcttgagtgtttctggattgaaatctctcatgagtttgtagtcagatgtgagctgaggctgcaattatctgaaggcttgactgaggctagaaaattcacttccaggtgacataatcccatagataatgagttgttgctggaaagttgcttcctcaccacagaactgctggagtagtctcataacgtggctgatggtatctcccaggatgagtgatctgagggggaaagcgttaaatggaagtttcattctttttatgaactacacttggaagggatatagcattacttctgccatactccattggtcagggcagtcacaagtcctggtccagattgaagaggagggggaaaaaatcctcacttctctgtggaaggagtgggaggagtgtgaattacctgtacagacaacatgtgggatgagataaatatgtaacatagatatcagtggaaaatatagtctgccactgtctctagagatcattctagatagtcaaatcacggtaaacattttaccagtcacgatgggtatctagactatgggaataggaatgtaatttcaagcccagttttaagaaagggcaagattttaaaaatttatataggttatgctgttgtacatcaagtacaatttcttcccagttggcacctcctatcccgttcttgttacagtcaaaaaaccataagaggaagtagatacattcagagaaatctagtttctatccttgatcattctaacatgtttcctgcttctacagtttcagtggcaggaacagaagctgttcctgggatcagcaacatggactttgacttgccaaggccaatctggctacactcactgctgagtgcccaatctgcccacagcagagatggacactgagtccctgatatggcaccattccctgggtaatcacccagctccccagtggcaggttgaacacactggaccacttcccttgtgggagaagcagagcctcgtttttatcgggatagatgttaactctgaacatgaatgtgctttctctgtacataatgcttctgccaaaactatcatctgtggacttacagaatgccttgtccatcatcatggcattccatacagcattggtttgattgtgggattaaattcacagcaaataaactgtggcaatgggtccacactctggaattcactggtcctaccatattgtccattttgagtagccggcttgaaggaatggtaggatgaccttttgaagacttacccaagtaccagctagcaggcaataccttgcagggctggagcaatatcctttaggaagctatacatactctaaatcagcactcagtgtatggtgctctctctcccataactagaatccaaggatccaggaatgaaggggtagaaatgggaattgtatcactcattattacctttagtgatccactagaaaaatttctgcttcccatcctcatgaccttatgctgtgttggctcagaggtcttggttccaaaggaagaaatgtatccacccagcgacacaacaatgtttctactgaactggaaggtaccactgcccatcactactttgggctcctcttgctctgaatcagcaggcaaagaagggagttactgtatggatggggtgactgatcctggctactaagaaggaaattggtatgctactatattatatagagataatgaagaacatgtctggaatatgacagacccattagggcagctctgagtaccaccttgttttgttattaaagtccatgtaaaaccacagctctatcaagcaggactgtaatgccccagatctttcaggaatgaaggtttgggtttccccactaggcacagatgatgaccaactgaggtactagttgagggaaaatggaaaatggattgaggagtgaaagatggtagttataaatactaccatgatcgcagaatcagttacagaagtgaagactatcattttaatgaatatttcttattttgtcatgaacaaatttgtgtgtttcaaaaatttttgttttctttcctcttttgtctcattatcacataacataaaatgtattaataataggtaattttaaatcatggtgtttatattagaggagatcaaaaagaagagagaaggctgggtgtggtggctcacgcctataatcccagcactttgggaggccaaggcgggtaggtcacttgaggtcagtagtttgagaacagcctggccaatgtgataaaaccccgtctccactaaaaacataaaaagtagcctggtgtggtgctgtgcacctataatcccagctacttgggatgctgaggcaggagaatcccttgaactcaggatgcggaggttgcagtgaggtgacattgcaccactgcactgcagcctggacaaagaaaaagaagaagaggaagaggaagaggaggaggaggagaagtataggaggaggaggaggggaaggggaagaggaagacgaaggagaaggaggagaagaagaaacatcacccaaggactctgcatcctcttctggagaaagagtcagtgcatttttggctataaggaagataggtgtatcatgttaggaggaaggaggactttgttcttacctttctttggaaaataaacatgatttaaggaaacgtgtatgggtgactggatgacaagaatggactgtgagggttagctttgtgtgtcaatgcggctaggctatagtgtcctcctcatcaaaaattattatagatgttgcagtgaatttcttttcagatatgatgaacatttactaccaactgactttaagtaaagcagactaaactttataatatgaatgagcctgaaacaaaaaattgagaaattttaagagcagaaccaaggtttccatgaagaagaagaaactctctgtggactgaagcatcaactacagcctgggagtttccagccttcccttcctgatggtctgccctatggatttcagacttactgagccagcttccaaagtctcataaaccaataaatctcatatatatatataagttctatttacctggtagaaccctgactgatatatgttttcagtgctttccccccagagaggtgggaaaaaaggtctactgctctgtaaaaaaccgaacataattattattgctttaaaattcctcatttgattctttatcatctgacatcccaggtacttacactaattatttttatttatctatggaaactctgtaattatgaactgtgttttgaaacgccaataatatctacttaatttctcattgaaataaggctttatattttgctctatttaaaaactgtcatattacttttatcgcttctgtactttctattaaaaatcacatattctgagaaaaaacagaggaatgataaaacattaactaatataaatgagtaggtattgagaggaagagatggaggtggtctctctttttctctctctctctctactgtatcattaaattttttgttattgccatcagcatatatatatgtatatatatgtgtatatatgtatatatatgtgtatatatgtatatatgtgtatatatgtgtgtatatatgcatatatgtgtatatatatgtatatatatgtatataaaatatgttctctaatctaactgaaaaaaaaaaactctgtagcacaaacctccttctgaacgttacaaccaatctctgttctccttgacagcaaatacaagggccactaccacttcagttctctacttcctcatttcacattttcacaacaacccattctatatgggttcctttcctgattactgcaccaggactactcttattatggataacagtgacatctgttgccatgttaccgcactgcaggttcagacatttggtgcttggctaagaatccaatggggggaaatctaccatctctcaggtaacagtggaatcttatgcccctaagcatatatgactcagttgaccagtcctttcatctttgaatagataatgttcctggtgacatcactcgtgtttggtttccctcccacctcagtgacttctctttctcaatttccttgattggcccttttctgacttttaaatattggtgtacccaagggcccaattctagaccccctcacctatttgtgtcaatgtagtcatcctaggtaatttgtccctataacttgaaatcccacctgtccattgatgacccctcccaaatctccatcataatccacaacctcttctcagaagaagtcctgactggtatctacctccctcctctgcatttccacttgaaaatctaactgaagtattttatgtggcatgaccaaaacagaactatcaatctgattcttcccaagaaactgattgccatgttttccacatcatttccaattttagaaaaagtcaccaccctctacctaatatcttaagtaccaaatatgagttattcctgattcttttactgtcatccatcaccaaatcacattgactctatgtcagaaacatcgatcaaatctgtgtgtttcttttctatgcactgctatcacgtgactccaatccacctccatctggatgactgtaatagtctcctaattcttctttctgcttccactcttgctttgtagcaatccatctttacaaacctttttcatagtgtaagcatcatcatgctcctcccctgattaacaccctataatagctgtctattgcactaataaaacaaacatttaaagcctttctctaggaaagcctcatattatctggttcttgcgtattctctcacgtcatgtttcttctcacttattatgatgtaactacactagtagtatttttatttctcaaacacaccaagcttactcttgtctcacagtctttgtactaaccactcctctgcctggaatatttcttctcttgaacttctgaaaccacctttgcaaaactatgaccgagacagtgaaagagctctaatttaatcaactccatcttgcttctaacctccgagctgtccttgttcatttctgggtgtaggctgaactgactttgggaaaaacttagtttgtagtttaaaacaaagatgataacagccctttcccaaagcagacctccttcttccctggggactagattgccttgtagaactaacattagccacaagattagaaattatggtttaggagtcatgcagctggaggctacaagattctgaccctccctaaactgctcctaagatcagtgtttgagatattttgcagactctacacttgatggatcagctggcaccacccagatggataaactggctcatctgatcttgtggcctccacccaggaactgactcactgcaagaagacagtttcaattccctgtgatttcatctctgacccaaccaatcaacactcttggctccccggcttccccccacccaccaagttcttcttcaaaactctgctctctgaatggttggggaggctgatttgagtaataatgaaactccagtctcctgcatagctggctctgcgtgacttactctttctctgttgcaatttccccgccttgataaattgactctgtctaggcagccggcaaggtgaacccattgggtggttacacttcacattagcagttcatgtaattctgatttcagctcacatgtcacctcctcaagatattgttttctgagcctctaagataaagtagcctctcagtcactctccattctagtccatgaaactgtacttattctcttgataaccttcattgctgccttctgtcaatcacaaaattacccttttccctcaatctttacaatcactgatctgagtgcctttgcatttctcactctctgtctcttcatctattgaaacagcctctgcattcacctgctattctgtgaaaggggagtagatttccaccgaatgatgtctgcgccagttctggtagagcttggtaagcatgagttagaaatttggaaaccactggagaatgaagagcaggggaatgtcatgatttgctatgtttttaaaatttttatattgactctgaagccgaatagcaactttcaaaagagtaaatattttccattttaattaagtccaatttatacttttttcttctatggattgtgcttttggtgtcgtgtctatgaactccctgcttagccttaagtcttcactatttcttctatgttttcttctaaaaagttagtagttttgcatttaatatttaaatctgtaatccattttggattagtttttataaaggaggtaaaacttagattgagggttttttgtttgtttttatttatttattttttttcgagacggagtttcgctcctgtcgcccaggctggagtgctgtggcacaacctcggctcactgcaagctccgccctgccgggttcacgccattctcctgcttcagcctcccgagtagctgggactacaggcgcccaccaccacgcccggctaattttttgtatttttagtagagacaggtttcaccgtgttagccaggatggtctcgatctcctgacctcgtgatccacccgcctcggcctcctaaagtgctgggactacaggtgtgagccaccgcgccctgcctagaatctcttacatgttctcactcctaagtgggagttgaacaatgagaacacatggacacagggatggggaatatcacacactggggtctgtcgggggctggggggctaggggagggatagcattaggagaaatacctaatgcagatgacaggttgatgggtgcagcaaaccaccatggcacatgtatacctatgaaacaaacctgcacattctgcacgtgtaccccagaacttaaagtaaaaaagaaaagaaaagaaattattcttcaacttcacattcttctactcactccaaagagtctattgtactccaaagcgtctattaagtatgcccttaacaagctccccatccccagagatatgttcttcatctggattttatattccaccagctgggtccttgctctgggaagttctaggtcctgatctcctggagagagtcactgtcatgtaattttcacagcagaagttagcccaagggacaggaggaggagtaagagaactgaaaccagttggggaacaggaaacagaaagcagagctccttctgatttttaatggccctaagaacacaccaatatactacttgttttaatagcagtggattgttgtgggcccatttaggaactaaagtacctgactgtgtttctcaacctcagtctttgtgggatgcagagattcaaccctctcaacctaaagggccaaggaatctgggtgtccaggacccttctctctccaagggtcaaggtaaagagaggagcaagtactgtaatgatgtcagaggcactggaaccagagcaactccatgttgaatagtagctgggtaaaattaggctgagacctactgggctgcattcccagacagtgaaggcattctaagtcacaggatgagataggagttcagcacaaaaaaacaggtcataaagaccttgctgataaaacaggttgcagtaaagaagccggccaaaagccaccaaaatcaagatggccacgagagtgacctctggtcgtcctcactgctacacccccaccagtgccatgacaggttacagatgccatggcaacgtcaggaagttaccctatatggtctaaaaaggggaggaatgaataatccaccccttgtttagcgtatcatcaagaaataaccataaaaatggccaactagcagccctcagggctactttgtctatggaatagccatgctttattcctttactttcttaataaacttgttttcactttattctatggagtcacgctgaattcttccttgtgcgagatcaagaaccctcccttggggtctggatcaggaccccttccagtaacagaagaattagagggaagcaatgaaaggcagaatgaagacgagaaggatggagaccaaaaccactgagagattgaagggaggcagagaagttgacaggacagagcatccacacccaggcaccccaagattaaccccataatttttggctccagtggaagctcatttgtaggtttctagtgcaaagaggtggtgggctttctgaaatattaggttctatccaagggtatcagagtggtatggagataaatgggaagcagagacagaaataaggtagtccacctaaaagcattattcccaaggctttgtgtcattaaggctgtttacaattttaagtagtttataatttaaaattacacctaacaatggcttaaaccaaagacaacatttatggtttatttgctttccaagaattttgcaagtgagtagtactaaattactttctgtccaaattatatcatttaataagtttattttgatcttttcactttttcatcactattttggtgtgttttttttttcctggaaattgccacctcacggccccaagatagctgccatagctcctggtctcacaatacagcatctcatgccaggaagatagggatgaaatgaaaaaatactgaaaattttagatctgaggcgagatatgttcagatttattttataaaaatttatctttgggtcctaataacaagaagcattttagaagattcccaaggaaggaagggtaagaagtatagatgtgtctaagaggcacaaggaaaccaaaatactgtgtgtgtgtgatggttgggaggggggaattaaaataagggaaatggcagaggacaccattatgcataaaggagaaggacccagatgtcaagagaaaaaaagaggcaaaggaccccacagagactaattgccaaacacatttgcaagtcttttgaagtccaattattcttcctaaaactgggttcctggatgcctctgcatgtttcccataaactctcgttattaaaacataagcagttgggtatggtggctcacacctgtaatcccagcactttgggaggtcgaggtggacggatcaccaggctggtcaggagttcgagaccagcctggccaacacggcgagaccccatctgtgctaaaaatacagaaataagccgagcatggtggcgcatgcctataatcccagctactcaggaggctgaggcaggagaatcacttgaacctgggaagtggaggttgcggtgagctgagatcatgccactgtattccaacctggttgacagatcaagactccatctaaaaaaaaaaaaaaaaaaaacaaaaaaccaaaacataagtaggttttctttcttgctacgaaatggcccatgattaacaaaaatgcctagaggcaagtaaacagaataagagtcttaaaatgaactttcactccaatggggcaaaaatcatctaaggatcgtctcagtcagacatgggtgagactcaaagtatgattcatcctgaggcaaattcctcttcagctgtaagcctgttaaatcagacaattacgtgctttcgaaaatatagtggtgggacaatctaggattgacattcccatatcaaaaaggagaaataggaaggaagaaaggggaaccagatcctgaggaagtccaaaacaatgtggcaaatacattttaaggcctcagtataatgttctttgactccatgttctgctttttggacacattggagctggggttgggccacaacagctctgggcagaaccaccatcatggctttgctgggtgtagctgatgcagcagctctcaggggctgaagtcaggtgctgtagctccccaagggtggtattgcacacaggtggctacactgttctgaggtctcaggggcagcctcacccccagggttccactggacattgccctagtggaggcactctgtggtggccccatccccgctgctgtactgggcattctcttaatgccatcatattgggggagggactctctgtggagagacagagagtctctggagacagccctctccctgagttgcatgcctgcgactccaggtagcaccttccttcaaaatctaaggggaggcagccacaaccccgcagctcatgcactctgtgccctggtggagatgacaccacacagatgtagccttggcttacagcctgtgccatccagagaagtggcctgagccgcagtctggcgtgcttgagccaaagcttggaaggccaaggagtgctatactggaatatggggaatacaatcttgaaattgtttgccgccaaaaccttgaaattgtttgcattctgtgcctgtgatgggcagggaagatgtgaagatctgtgagatgccttcagagtcattcttccattgtcttgatgaatactatctggcttctatccatgctaatctccgtatcaaatgttcacttacccacaccattggtgttctcccctgaacatacttttgcactttttacaggctgagaattttccaaatctttaggttctacttcctttttgattataattgccttttttttttttttttttttgagatggagtcttactctatcacccaggctggggtgcgcagtggcgcgatctcggcccactgcaaactctacctcccaggttcaagcaattctcttgcctcagcctctgagtagctgggattacaggtgttcaccaccacacccggctcatttttgtatttttagtagagacagagtttcactatgttggccaggctggtctcgatctcctgacctcatgatccacctgcctcggtctcccaaagtgctgggattacaggagtgagccaccgtgcctggcctataattgccattttttatgtaactcttttcctgcattttactataagcaatcaagagaagccatgccacaccctcaatgctttgcttagatgtaacttccaccaaacatcttattccatcactcagaagttctaccttccacaaagcacaaggacacagacacaattcagccaagttctttgccactttataatgaggctgtcctttcctacagtttccaataatatttctcattttcatctgagatctcatcagaatgacctacttctacatttctaccaatactctgatcattattgcaatcttcttctgagcctgtagcagaatcaccctcaacgttacattcatggaaatgtagagttttttctagcactcacaaactcttccagcctctcacattacccagttccaaagccatttccacatttttaggtatttctaattataatacctctacttcttggtacaaattagtcttttagcccatttgacctgctataacaaaatctattagagtaagttatgatccacataaatttattactcacagtactggaggatagaaaaaccaacattaaggctgggcacagtggctcatgccaccataatctcagcagtttgggatcgcttgaggccaggagtttgagaacagcctgggcaacatggcaaaatcccatctttaacagaaaaaaaaaaaaaaattagccaggcatggtggcacattcctgtaatcccagctgcttgagaggctgaggcacgagaatcccttgaactcaggaggtggaggttgcagtgagacgagattgcactgctgcactccagcctgggtgacaaagcaagactttctctcaaaaaaaaaaaggaaagaataaaaaaagaaaaaccaaggttaggatgccaacagattccatgtctgatgagggcccattactcatagacagcgccttccatatgtcctcacatggtggaagacagacaagctccctcaaggctttcttacaaaggcactaatcctatttatgagggtgcaaccatcacgctctaatctcctccctatggtcccgccttttaataccataacctagggggttaggatttcccatacaaatctggggaggggagaaacaaacattcagactgtagcagatgcagcaatagtaactttaggaatgtggaatttataaagagcactcattcttccccattccccacagccatccagtctccaaggctggtctactcagcctggacaatctgtctctaagctacgcctcttcttgatcacactattcctgccctgggtagctcttcaagaaccttaccttgatttctggcaacattctccattctaatatctctgtctccaattagaaacattctcaaaggcatccctttgcaggactacagaacaatatttttcagaagcacacacctgacaagtcactgtcctgcttaaatggttattcatgttattatgaagaaattccaagtccttcttgtagcattcaggaccctccaacagatggcttctgccacttgctacacactcagtgtttattgctgtctgcctcaccatctatgctccaataaccgcaggtaacctgctattttttgaccctttcctgcgtgctttcactctcctctgcctggaatgtatttttttttgcttctttatctgagtctttaagattcatcccggatgttatctgcattgcacttggaagtgaccctggaccctgtcagtctcagttagttgttccttttgggaaatctcataatgaaccaggcatctgtctatcactatatacccccactctactgtgactgcttagggaaatggcagaggacaccattgtgcacaaagggtgcataagactatgcttagtcacagtagagtgacgctgtcacctctttacctgggtagtcggcatctccagggtaaggcacatgtctgtttaagctctatgtctgcaggagccagcaagggagcacctcttcagaggcctcatgcaatacccaccaccctttattatactgataagtaaattccattttaatcaggtggcaggtagcaatgtgccactgtcctaggaaagcaatcatgattggcctaagccaatatgagcaacttgtcttttttttttttttttttttttttgaggtaaggtattgctcattgcccaggctcgagggcagtggcatcatcatggctcactgcagcctcaacttccctgacaaagcagtcctcccacttcacctcctgagtagctggaactacaggtccacaccaccacacccagctaatatttttttggttttagagatggggtctcactatgttgcccaggctggtcttgaactcctgagctcaagcaatcttcctgtcttggcctccccaaattctggcattacaggcgtgagccactgtccctgacctttatttttatgtatcggtatttttgttatttcttggccattgattggtctagagatggcatgctctggcaatgaaagacaaggagaggtcctgaagagactctggacaaggtttccctctgtaataaaatggaagaggcatgtgaatgagtcacattttctgcctgtctcatgattctggctcgggagggcctgttgatgcaatgtccagaacagtggcagccattctgtggtcactttcaagaaagccctagaagaaaaccaatatgatgatggagtggaagggtgacattaaactcaatttttgttcaaactccagatctatccccttccaaaactttttttaataataaatttctccatggcttatgtgcttcattggtttactctaccttatcactgaaaacatccagtgaatcagagagaaaatagaaaatagttgactcttgttttgtggctctccactgtttttcatggttctattccttgggcttgagaacaacattctgatggtgtttaaaaactcagaaagagcccatctccttagatcagtagtccatagagcatctccctaggggcagaaggttagggggttaatctcggcaatggtgtggagtgtacagtgtctctcatttaccttccttacctctctacatgctcctagttactgcttctctttgtaactctgaggtatgaaatacctcaaagcatatttgattttgtcacagatttctggcacagggctcttaaaacccttggaattccctgagtgataggagtattatttgttattcataaacagccccttttgatcatagctgagtttatgctaaggagatcatggccttaggatgggactggtcaccagaaagaccaagggattagagggttggagctgtcagccccacctactgatctccaggaaggggaggcagggactggagattgagttccataaaaactcttgaacaatgagatttgatgagcttccacattggtgaacactcaggagtgctgggagagtggctgcctgaagagagcatggaagctccatgcaccacccaaccccttccctgccatatacctgccatatgcctctttccaatggactattcctgaggtatattccttatataaagcaacagatgcaaacaaagtgctttcctgagttctgtgtgccattctagcaatttattggtgtcattggaacacccaatttatagcctgtcagtcagaagtacaagtagccacctgggacttgcaacagatgtctgatctgatctgagaacagtttgtgggagtgagccctttagcttttcggatctgagctgaatccaggtagacagcatcataaccgaatttttaattgcaggtggcccaggtggtgtccccagagaattggagaatttcttggtgtagagaaaaagtatatttggtcagaaggattgtgaaagtagagaatcgagtttttgtttcaccgtgcatctttgtttttttattgtttttcctctcattcttctcaccttggtaattgtttctttcattttcctgaatctctgaaaagaaagggcctggactctcagatttcttggcctttgatatttggaaggatgaactccagtctcccacagaaggctagaggtgaaggaacattcagacacataagtttccaagataaatcgtctgagaacatctccaaggtgtcttctgggaatggtaagaaaccctgagtttgtgtcactggattgattccagctccattgtccccgtgtccttcaactaagtctctgctgaagcctgttctataaaaacagcaagtaagtggtttggactgacctattgtactaggttcgacaaagcaaaccaaatggagtcagtcatactaaaactccacatcaccaaaccaaaactaatgtatctgaacttttgagaaatcaggagagagagaaaatggacaaattcctaaaacaggccagtttcagtgggcatgaacatgaagttctgtctgctttcatctttacaaaaaaaaaaaaaaagcaatctgtggtaacttgacttcaatcaatcagttgttccttattgctgtctctctattcctgctgcacaaaaaaaatgcaacatccagatgaccaatcaggtttttgttctctgtttctgctttctttagccctcctatccctgtaaaaccaacttccttggctctaactatcaaaacactcattttgttttatagcatgacaggctgtctgattccatctttataaccaaagccaattaagatcttaaaaccaaacatataacttcatctttttacaagtacttagagcctgagttgctccacaggaatccaggaactgggcacaggaaaaggatctaagctggtggtaagttggggtctgaaaattttaaagttattgttgaaatgcctgctatatgacagagcccttctaactctggagtagcgtagtccagtgaagaatccacttcgttagtatgaaaacaatgttaactatttcattaacagtgtttaatttggttacatgttccagtaacattctttttttttttttttttttttttttttttgatggagtcttgcgctgtcacccaggctggagtgcagtggcacaatctcagcccactgcaacctctgcctcccaggttcaagcgattctcctgcctcagcctcctgagtagctgggattacaggcacctgccaccacgcctggctaattttttgtatttttagtagagacggggtttcaatatgttggccaggctggtcttcaactcctgacctcgtgatctgcccacctcggcctcccaaagtgctgggattacaggcgtgagccaatgtgactggccaattctttatcatatatgtaattaaataaaatttattactaaaataatttccccaaaggtgttttacttttttaaaaacagtggctacaaaaaaattttgagtcccatatgtagctaaagttaacacattatatttctactggacatgtagcattgtagagatgtagcattgaaggatcttgatagtcctgtggagcttacgtactagtgtggagggtatttaagagagaagataaatgaacaaacaaataaaggagaaaagtatctggtgagataggctgtacctgagcattctgctttgcagagtgggtgaggtgggatctctctgaaataatatttgacctgaaatatgaatattcaggatgagccaggtgcaggaagctcaagacgaagagcacggtaggcagaaggaatagagaaagcagaagccctgagatgacaaagagctgcaagttcaaggaattagagcccagtgggtggagcccagtgtgtctgatgagagtgcagagatgaggtctgagggatgcacagggcacatgtggcagtggataagggaacctaggataagggaacctaagataagggtaacttagaagtctggaagccatcggaaggtattgcgaataacatcaccatcttattggacctttttaaagctcatttggtttctgtctggagaatggatcttaggggagggggcagcaggaccaggaaaaagctatttgcaaggcttgtgcaaatatccaagcctgacagggccatggacaccggtcgtggagatggcaatggctctggctgtgcattcagcatgttctgtagatagaatgagtaagacgtggatggcgttgggtggtgaggaaaagagaaatgaaaggtgagttctagatctggagctttaacaactgaatatttaatctccaaatagatacagaatattggaagagtggcaggtctgggaggcagagaacatcaacagtttggtaaaaccatgtgaggtttggagtctatgggactcccacggggagaggttttatcagacttgagtgccagggagaggccacggctgataatttagatgaaaagacagcataatggtttaatcccagagactggatgatatcatttatagaatgtgagataccccaacatttagagtcaaatttagaatagaaaacaccgtaaattggactaaaaagaggaagagaatcgagctgtagagacgaccaagagtgtattgtgtgcacatatctcttggatatatctcatggcataggaaaaatgtgtttgaaaagggagaaagtgatccaatgggtcctgtgtcattgggatatcaggtcttaaaaactgagaaggactcactggatttggcagcctgggggtcataagcatccttgggaaaatgcattaggtggagtgctaaggacagaagtcaatgtggagtggattaaggagaacagctgaggcgaagaaggaaaaggaagaattagagacattctctttggatgtttggctggaaattctgtcttacagacagaccttacagagaggtcatttggctagatagggttgaagctggaaagaaatatgcttcaaaggaggtttctcttgaaagagagggggcgtgattatgtgatagaatgatctagtagaaatacaattttcaatttttttggtataaaaaatgatcttttatccctcaccacatcccacctcaatctaagtcttaactttctcgtctgtacaatggttatacaaattaaaactaacattaatcaatattcaccgtgtctcagggtgtgttgagtgcttacacatattaacacatcccatccacagagcctatgagaggagttgtgagggttaagggagaagctcttggtgtgtggataatgttcataagtagaagctactattgctataagcatcgttcttgtcctgaccctgagcttcatagtgcagggttcgggattgtaccccacaacacaacacacagcctggtgagggctaagagttctaatttgttacagatttaccgacctatcctagatgatttccatgtctattctttttttttttttttttttttttgagacggagtctcgctctgttgccaagctggagtgtagtggtgcaatctcagctcactgcaacctctgcctcctgggttcaagcgattcccccacctcagcctccagtccatgtctattctatttaatcctcccctgaaaatcagtctttatcaaaaaaccatttcagttctgcagaggggaaaatgggggctcaaagagatgtcactgatcaagaatttacaccatcgaggtgtcagagataagatcagagtagagatctaactgactccaaagcctggtactctttacactgttacagtgacacccaactggcagggggagggggtgggaggtattttgcctcccaggggatctttgacaatgtcttttggttgtcactcctgaatggggagttgctactggcatctctggatagcggccaggggtgccgctaaacatcctactgtgtacagaacagtccaccacaacaaagaattaaccagcccaaaatgccattggtgtcaaagctgagaaaccctgagctacactaaacaatgtccctgggaagacctcagtgaaagtgactgataatgataggaaaaaagaaggaaatgagtaaaagaaataggagaaaaaatttattatacgagggcaggaccctatcctggtaattttggaagaacgcctttcaatggcagcacttgagcgtgcaaaggtagtggctctgttcggtctggtttacaaatcttcctgtctccactgactggctaggtatgatgctgaaaaaactacaggagtccctgggccatggattctccctagtaaaaaagggatgatgatggctgcctcacagtgttattatgagtattagatgtaaacaagtgctacataattgctatcattcttaaagaggctaaatagcccagggtgggaagattctcagattttcatgatcatagaaaattgctgtagcttggctgggcgtggtggctcacacctgtaatcccagcactttgggaggccgaggagttcgagacagcctggccaacatggtgaaaccccatctctactaaaaatacaaaaaattagccgggcgtggtggtggtgcccagctactggggaggctgaggcagaagaattacttgaacccaggaggcgaaggttgcagtgagccgagatcacaccgctgcagtccagctgggtgacagaggaaaaaagggaaccattcggacatttgcccctgaacttgaagtgcgccacaccccactcccactgccagttgccacccccgtcagctctctttctgcctgtcctcttgctcctctgagtgtggcctccagatgtctcatgtacctcccggggtctgtgaatactaaaacctctcgaactttaacactgtcgtcgcctcattgaagccgcacccacaatccaacccacgatgtgaggctgcccgaaagcgacctgggcagttggatcccctcttgatgttcttttgtcctgacctctggtggctgctgaggatggtcactagcagctgagttgatagagaaacttgaagagcttcatttaatactactggcatagcaggcaggcttttggctgtgtcttggacacaatcccaatgtctgtgtgtgtggatgactcacgcacttcctgcatcagacagcccagtcggtctggcccagacggcactactgcttgctggtgctccattttgctgcttcgtgcagcttagtactgctgtcctcagcagttaacttggagattctccagaaattccagtgaccgtggacggctctttgaggctccaggctccccagcagctgcaggagggcagatcctattgtaatgagggtgtttccctgtgggacatcagaaaccctttctgggatcaggcccctgacagggggccactactggagggcatgttgccccttgagccatacatgcttctctggtgacctagggcctcggtagtggtccggcctgtattggctctaagtagcaaagtactggcctccagccagagagagctggccaggatgctgagctggccacccggtagcccatggctcgatcctcagctctacctccatcttgctgatgatagggccatgggccaccaggctcctggggagcagcgattccaccatagtgaagttgaagaggatgacagaatgctggcttcagtgtgtcagtgaaggggagctgggtgaaagggtccagtcgcctaactctaacctgtgacacggcaactgcacctgagtccccagggcaccttgcaagagccggtgctgctgaggccagtgcctccttggttgctgcattccttggtgctatcacttctcgttctcccagcccctcagaggtcgatcgggtcaccctggaaagaaaagcggctgcctacaaggccagtgcaagtggagctcattgttcggttttgaagagaaagtgagattaaagaaagacacacaaagacagagtgtctcaacagcaaatgcaggcatttatgtccagtataaacctgcagaggtgccagtgcccaccactgcttacaggctggggcaattacaggcctgggtgggagaggtctggaagtggagcatggcccgttgcctgggaaaatgttgataacatgttcccatgatgaggcggtttggcacttgttcctgcagaatgtgatagtgatgttccttgggcctttgcccggcagagtgtgataaggatgttcgtgtgccttgtggtcaggtggttgggcaggatgtttctcatggcccgaaaccccatggaatgtttcactttgaccaaagtctgcaaaatggtggggggcttacaaagtggtgcagtttggactaactctcaataccatttttttttcttttttggtaacaatgtgtaaagtgaaaacagcagagtgctactccataccactgggatcttgtccagtaaacatccagagagtgaggttaggaaataaaaagtatataaatattagatgcctagaaatgcaagtcactttaaagattttatgtgaaatagaaaaaaaagagaggagagggactcattgtcttgtaatgggtccttcccagagagaggtgactgtccagtggcaccgggcccttttcctccttccccttttactcttatcaactaggacagaaactaagaattttggcttcaagtggctaaaagactgatgggggaaaaaagaaaatagaaaaaaataacagagagactgacgctctaggcagttacaagtccaagaaaaaagacagaaacttttaactttaagtattgagccaaaaccaggtctagcaaacataatgctggccctagattatttattaatttatgaagaaacttctagatatgggggtgacaaaaggaaattaaatccattatatatgcatatattttaatgtaaatatataatagataaattatgtatacataatatagaaccaaattgaaacagttttacaatttggtttgactggaaattcaaaatccatatattaatttttgtagtaaaagtttatgtaaaaaaagacaaaaaggacactgattggcttttgttcctctacaatataggttctaacttaacttctaacattagcggccggacgcggtggctcacgcccgtaatcccagcactttaggaggccgaagtgggcagatcacctgaggtcaagagttcgagatcagcctggccaacatggtgaaaccccatctctactaaaagtacagaaattaaccgggcgtgatgctgggtgcctgtaatcccagctactcaggaggctgaggcaggacaattgcttgaacctgggaggtggaggttgcagtgagccgagattgtgctactgcactccagctgcacgaattgacaaaatttatggacttcatagtgggattcaaattatagttatacatagggatctcattaaatttacttactctactcccataatcttgagaagctaactaaaattttgaaaaatgagtagacctcactttatctgtagcgtcgcctaaatttcccagtcatacagtcattgctctaaaatattctatgttggacatagattctgtgacacaattaataacaaattaaaattaaagtaagcttttggcacttacaaattggcttgatcaaatgaggccccttagtcccccagttaagataatttattacggcccaatagaagttgaaacagcaccttcaaggattaaaatttattatataaaaccgaattaataaaagcgtgattatcgacaccacatctccatttagcaacccaaaagttcttcctgttcccaaatctgaaaaaaaaaaaattcgtaaaaatgccttacgatggatgactacagcagacgggctgttgagggctgcctcagctcttcagcccagaccagtgacagagctaccaacactgcttcacctcctgcagaggtagaggtacaggcaatgagaggagggggtcagggatattttttagccctttctcatcctaccctcatgccagtcccagctttatctacccttgagtcatattaagccattcaaggatgagtggatgaagtttttaatcaggaaaaaatacttccatgccccccaatttgagagtaagaaatagaaaatgaggctattgtgggtgtcatttctaatttctggacctcagcctgtaccctggggtaagtggaagtggaaaaaaactacaagaaaacagaaagagtggtggggatttgtaaggcttggatgagatagtatatattaaagggaaaacttaattactttacccttaagtgtaatgtttgctgtcacctttttgtatctttctctttttaatcagactgttgaaggtgtcttctattcttactttttaagagttctcttcttctattgcttaaattatgaatggatgttaaatgttttcaaatgtaatatctgccaatattaacatgattatttttattctttcatttacatcgttacagattattttattgtatacaactgtatacaaacttcatatggttcctttcatataataagaatgtaagctgtctgagggcaggaattgtggtctgtattgcttacagatgaatcctcaccctctatgtgtaaaatagtgtctgacatgtggtaggcactcaataaatactgaattaatgaatcaataaatagtgtcacctagatatttaagtgagaaacatttgatgtctaattaaaattatctctgttacaaattattttattaaattaaattaatttaactaaaattaaaataacgtgaaccaagtcatgtctagtaaattctcatcctcatgtgcgcaatatttataaattcccaggtggcttccattttcatgaacaccttaaattttgagtttccacttcaatacagtactctcactaacaactgcctaatgactttgtatttaaataaataaactcataactcagccctttaccttgctttctccacaaaaacactcagaaattgtcaattttgtattgtgtaacatactttcctgatgcactggcaaaagacaccactcaacatgaataccaaggaatcctgttatcaatgtcctctctcactccactgctttactcattcttctcgtcttctctagagttctgtgcatttccaaggcagagcagtttgaccatttcattcacacttttgactcctataaatgctttcaatttccaaaaaaaaaaaaaaaatgtatattctttaatgcccaactaagttgtggccatagaaaatgaggaacaatgaaaaaaatgcaagacagaaagtcaggagccacgaaggacagcgtgagacctctagataggagagccagggcttccagatgggctaattaatagactccctctactgccaggacaggggattcttacctttccttcccactggccttggttaattgcagtagaacagtgtccgctacatctcccttttttcttttcctcattaggagtttccattgtggattcccaattctcattgcatcgtggtatattggggctttgaagctaagtattcttttaagttatgggacacttatcacaaagaaacttcaacataaaacgttggggatctcatccttgggaaggatggctctacttcttctatttggaagaagagtgtaaagggatcttgagtacctgaaggcataattctggccaagactgacagctgcctaaccaacattaatcacccttcttcactgcagtgaatgcttataagggtctgttgcctcggcatccagtctaaatacaagcttaattttctcatacgaggctcagggctcagtcacccttgacacagtttccagttctacaccacagtcacgagtacaagaaaaaaaaaagaggaactttaaatttaagtactgggcagaatccagatctaggaaacgtaatcctagccctggaatacttactgatttatgaacaaacttctaatgggagggtgataaaaaggaaattaaatacatcatatgtatatatgtatataatattttaatgtaaacataggacaaataggtgaattatgtacatttaatatataaccgcatcaaaacaaagttttacaatttgatttgattgggaattcaaaattcatatattaatttttataccaaaaaaattatgtaacaaaaggataaaaaggcactgatttggttttgtgcctttacaacataggtactaacttaacttcaacaacagcaaaaatgctcaaattgacaaaaatttatggactttacattggggctcaaattatagttatatatgaggatctatcgagcacccgattctgtggctgttcggggcgccactatgtaacctgccatgatccctggtggactgaacaaaggggggtgaatgcaggaataaaagacaagagacaaaagagtatatttggaagaaggggtccgggggcaccttgcctctagtggacaaggccctgagctttacacggccctctgtatttattagagaaaagcgatagtgagaaggggggtggaagaagaggtcagttggttggtccagagtaggcttgcaagactgcattctctagatgttccagtagataacttcaaagagcttggcgtcaggaagcgattgccctcagcaaaccttctggcggcaggcacagtcgtgagtttgctcacatcctgtattcatgataaacagtttgctgtttgatcatatagcctccagtggaatgctgagttggtcacgtcccatgggccttcggctccctgcatatccccctgtttatgaattaattgaaagaatgtaagaccaggctgggcagctctcattctccgattggcggtccatccgattttacagactataaacagaagacagagacaaaacaacattactccaagaactacatataagatgttactgtggtactttagataggtccaagggttgaggctctccaggccttcctggaattcagtccagtcttctaaagaaggctgaaattcttgagtgtgcctatttaaatcaagaattttgttttgtaattcactaatatcaaaggtgatgttggatgtgaaagctccttgcaaatgggctttcacaaggtcccacggatactcacttttgttatattctaagttggttacacaaatacgagtgtgattaaaatgacagcgcaattgccgctgcaactgcaagctttatacttgttcccctaaccacagaaccatggatttcaacattgccacttcagtttgtaactcagtgttaattttattctgaagtagcctcgcttggttggctgtacgtgtccaattctctacgtactgagccgtttgaacagaactatgcaaagttacagaggacatcacaacagaagttattagtgtgaccaaggaaacgatagcaaaaattatcatgcctaaggctctacgggcacaataagtaacctgaagtagaagaagtttcacaaaatgcaaagcaggtgtggcagcccaagcctcggacagattaacaggaatccctagcccagggatgcaacctaaaatcatcaaagtcgagatattatgtgttcgcaatgtgctatgattaatgcagtgatataactggcaagatttacaggtcaactgggtattgtttacctggagctggtccttctgagctgccaaaaagacataaggattaaaaacacaaaccacaaattgagtggtgatattctttacaaatgtaacattaagactgtgtcgtgactccagtcggccttctctccatctttgcactcaggctcagctgactcatggctcgtaccggagggactgggcccatggttggccaccccatgtttctccagtctcccattccagggttgcaagcaccttgagggcacccacatggcttgtcaatctcctgtaaacacacaagcataccctcttccccatgtcagtaaatccaccgggcctttccattgtccttcttctggggatttccataacactttcagataaactttcctcttttcctctaacacttgccaatgtctttctgctggagtcttaccatccgtaccaggagtcaaaaattttaaagtaaataaggctaaatgtagttttgattgaggtggtagttggcctcctataccccctttttgtcttttcaacattcgttgtaatgtttgatgtgcccattctataatgccttgtcctctaggattataaggaattcctgttttatgggttatagcccaaagctgtaggaaattttgaaaagcatgactagtataagcaggtccattgtcaatttttaattgtttaggtattcccatatgagcaaatgatgacagacaatgtcgctgtacatgaccagctgtctcacctgtttggcatgtaccatgcagcatatgagaataagtgaaacaaattaagcagttctgggtctagcgtacttttaactgtagcagtttctatgcgaatggctaaatttacaacataagctgaacaagaagaatctccttgcagggtttggtaaagatgtgtaagttgataggtagcaatacctaacatcgggcgtagccaattaatatctcctaataattgctgaaaatcatttaaagtctgtaacctgtctttatggttgacaatgttgattgtagcctgccacgatccctgatggactgaacaaaggggacgagcgtgggaataaaagacaagagataaaagagtatatttggaagaagcggtcagggggcagcttgcctctagtggacaatggccctgagctttacacagccctccgtatttatcaggcaaaagagatagcaggaagtggggggggtggttgctggctagcagcctgattcacagcaggcttgcaagactgcattcttaaaacagtaggcgctagatttctcaatagataactctcaatagataacttcaaggagccagggagtgaggccctccacaaaccttttggtggcagcgcagtgtgagtttgccacatcctgcattcatgataaacagtttgctgtttgatcatatagcctccagtggaatgctgagttggtcacgtcccatgggccttcgggtccctgcagttgataggatctgaagctgtgagctgtaaaacctcacagctgactgcaactagctctgagcattgacctgaaaccccagagatccttattgtttgagtatgttttagtccatagatggcagcatgacctttggaagagccatcagtaaaataagtctgtccacctggaataggtttgtgatgagtaatcacaggaagaatgaaagaatggattttataaaactgtaaaattttgtctgagagtagtggttatctatcacgcccatgaagtctgcgaaagcagtttgccaggcagtcgacatttcccaagctgcagcttgttgctgagagtctaaaggaacaataattttgtcaggatcatatcctgtaagcatttgtgacctatgcctgcccatagtcacaatttgtgtaattaaagaaagataaacttgcaaggttttgactgtttgattagatagaaagaaccattctattactgttacagactagtctataaactggcccaaaagtcctgttggagagtagggggtaggaagaataaacaaaagcaaaggtttttgtggttgtagccatgaggcatgtctctgctgtaacatttgctctacaagctgtaatttggcttctgcctctttagttagttgctgcagggaatttaaagaatctccgtgcagggtttggtaaatatgtgtaagttgataggtagcaatacctaacatcggtcatggccaattaatatctcctaataactgctgaaaatcatttaaagtctataacctgtctttatggagaactactttctgagtccatacacttctctctgtaacaatagttcctaagtattggtatggggaagttgtttgtaccttttctagagctattttgagattccatttagtcaaagcctgctttgtttctctgaataactgatgtaggttttgatctgtaggagcagccaaaagaatatcatccatataatgaatgatgtaagcagtaggaaacatattccgaggcttctttaatgcctgtcctacaaaatgctgacatagcgtaagactgttaagcatgccttggggtaaaactctccattgataatgagaaacaggttctctttgattaatagaaggcacagagaatgcaaatcaaggcttatccttctcgtgtaagggtgtagtaaagaaacaatccttaagatctattactacaagaggccagtctcttggaatagccgctggagatggtgaaagtttttgtaaggcacccatcagttttatgtgtacatgaatagctcttaaatcatgtagtagtcgccatcttccggacttttttggaaaaacaaacactggagaattccaagcttatgtgtccggcatcccattgttcttttactagctgctgaagttgcatcaggttctcctgagataggggccattgatccacccacacgggtttgtcactgagccattctaatagtgaggcagtgggcagaggagaaatatcaatgaccctcgtcagaaatcctgacgtcctagcccttttctatctgtttttccagttactgatattgggttaggatttccttgaagaaattttcctaaacattttcccctctgatatctcatgttcttcaacattttaaatcctgggttatcaaagttttcatttgtaagtctcatattccatgttataagtaagtctcaaccccataaattgatagctatattttcaacataagactgaaaagtacatgactgtccatctggaccaagacaaggtaaaatctcagtgctctgttgaacactttgagctgttcctactcccactagggatgtagaagttaattgcaagggccaggatgggggccaactgtctttagatatgactgacacatcagctcccgtatccataagcccataaaatttctttcctttaatgtgtactacacaggtaggtctattagaggctatgggttgggatagatagatttctcatgtagttgtgctcccaacctctttattttctcatttctcctttcatggagaagggtgtgatttgcagggaataagcaataattgagcagtatattgtcccagctcaaaacccaaagatcttgtgacattaaaactacttgaatttctccttcataatcagagtcaacaacttctgggactacagtaatgccctgtaagttaaggcagattttgcctaaaattagtttcacatatcctgctgataaaggtccccaaatatcagtgggaactttgatgggtttgtctgccccaactaacattacccattctttgactgggagatctaatcctgcactccttgtgttcctggggtgagggaatcaatgtgcctctgggaacccatgcctggaacggggttgaggtctggactgggaatgccctcattgtttgtggggcctgggtccaggcccccatctcatttcccagcaggggggtgccattctgatgaaattttgagcggcactgattagcccagttatttcctctgttacgcaaggacaaagtcctggcattttttccactgggtggggcactgcattgtaaggtcctttctgtactgagatctggcggcattcctttttaaaatgtccaggtttttcacaattataacattttcccactttagggtttgacccttggctccttttagatttgtcaactgctaaattagccactgcttgcgctaatattgcaaagtgatgaagctcagttcctacatcttgacaagctctgagaaaacttcccaagttttttatacacctcaccagtgccagtgcatgtttacaatccgcgtttgcatcctcaaaagctagagttaaggttagcatttctgcagccgtggtatgaggaatctgacgcttcactgcctcttgtgatcttgtaagaaattgcacatagggttcctgtgacccttgcatatgtaaaaaggattgtactgggactccctcttcaggaattgcggcccaggtgcatttaacagcctgtgcacactgctgataagcagcgtctgggagtgccatttgactttccaggtctgaataagggccattacctaatagcatatcctctgtaatgtctccgtgtccagcaacatggttctgtttagcctggtctgcacacatttcttgccaatttaaattccatgtcagatatgcactagtggacaagcaagttcgcatcaagtgtctcacatcaaagggtaaaaaacgcatagcaccaaacacagattctagcaatcctaaggtcaaccggctctgtatgccattatttaccactctcgcttttaattccttcaacaacttactctagtggggtgtgttcatgaataacctgctgtggattgttgggatcaggccttatggaaataggaaaagtgcaaggtcctaggggctctccagctatggcagcagagcataaaattctttgtattggggtctctagttctgctaccaaaggaggcaatacagatgtttctgcaactggaggaggctgtataggccaatttttatcctccctctcctgttttttattttcatctggagctgtgagtgggacaacagattctttcagatttttagattcagcctgttgtcccacagaataataaggagataatggcagaagtacagtatgaactaaactccaagtggagaaaacagaaggatcaattttaagacctttttgatgagcccattttaatccttctgctctgtcccaattttccacatcaagggtgctgcctgtggaaaccatgggttatgtgtaataacctcctgcagcagctaagttaatgtctgagaactaacctgagcaccagtttgtttcaacagaactctaagcaactgcacataattatttttttcagtagacgaattctgccccatgttaccgtgattcagaaaacttcccattcccagtacttctttaaggaactgatcccagtacctctttaggcgctgacctcatgtgcgctgccagctgactcatcccagggtccccatttgcgttgtcaatttcagttcctctattccaggagatcttcttcattcacatcctcatagtcccgtgttcagactgtcgcctgtttgagtgccacttgtagagcccctgattctgtcgctgttcggggcaccactatgtaacgtgccatgatccctggtggactgaacaaagggggatgaacacgggaataaaagacaagagacaaaagagtatctctggaagaaggagttagggggcaccttgcctctagtggacaaggagctcggcaccaggaggcgactcgccctcagcaaaccctctggcagtgggagtagtcgtgagtttgcccacatcctgcattcatgataaacagtttgctgtttgatcatatagcctccagtggaatgatgagttggtcatatcccatggggtcttcggctccctgcaaggatcccactaaatgtactcactttgcccatattgtcttgagaaggcaactacatataaaattttgaaaaatgagtatacctcgctttaactacagccttgcctaaattacccatagtcatacctattgttctaaaatagcctatgttggaggtaggttgctctaaaacagaatatgttggaggtagacataataaataatacattaaaattaaagtaaattgtttgcacttagagattggcttgataaaatgggatcacttagtcccccagttaagatagttaatatggcccaacgtagggtgaaataatggccttcaataattaaaatttgttaaacaaaacgtgattaataaaagggtgactatccacattgcatctccacttaacagcccaaagtgcttcttgttcccatatctgaaaataaaaaatatcacaaagaatgtcttatgatggatgactacagcactaaggctgtagtcccatctatcagggcccccatatctaacatctaatattattaaaaattgctaatactattcaatcaagaactggtaaacattttgctctcattcatttggctagcatgttctgttaagtgcttatttctacagaccctcagctacagttgcctccacctctgaagaaacacaatacacctttccaggctacctaggggtaccctcatagctttggcatcacacacaagctttgcagacaggagcttaatgacatccacagtctccataagcacaggtgcagcattacattgaggacaacctcctctaagaagattcacttgatacacacattacagtcatttaattcgtctcttagtccattcaaggtactataacaaaatttattatgctggataatttgtaaacaacataaatttaggccagacgtgggggctcatgcctgtaatctcagcattttgagagtctgaggtgggtgaatcacctgaggttacaagtttgagaccagcctggccaacatggtgaaactctgtctctacccaaaaatacaaaaattagcaggcatggtggtgaacctgtagttctagctactggggaggctgaggtaagggaattggttgaaccctggagatggaggttgcaatgggccgagatcacgccactgcactccagcatgggtgacagagtgatgctctgtctcaacacacacacacacacacacacacacacacacacacacacaccccataaatttattgatcacagttctgggggctgtaaagtccaagatcaaggtgctagcagatgcagtatctggtgagggccattactcacagacagtgctttctatgagtcctcacatggtaaaagggaaagacaagtgcctataggactcttataaggcactcatcctacctatgagggcagaacaatcataattgaaaacctccaccttttaataccatcaccttggtatgagcaacctcatttatatttttatttttatttttatttttggcccagggaatgatctaaggatgtcatgtttcagtggtgaaagataaggacaggtcctgaagagactctgaaggagtctttataaaggaggatgggatgttttccttttttttgagacagagtctcactctgtcacctaggctggagtgcagtggcgtgatctcggctcactgcaagctccacctcccgggttcacgccattttcccacctcagcctcccgaatatctgggactagaggtgcctgccaccacgcccagctaattttgcttttgtatttttagtagagatgggttttcactgtgttagccaggatggactcgatctcctgacctcgtgatccacccacctcggcctcccaaagtgctgggattacaggcataagccaccgcagctggccgatgttttcctcctttataaaatgagacaggcatgtgaatgaagccagtttttttgtttatcttcatccttctggctctggagggcccgttgatgtgatgtccagaacagtggcagccattctgtggtcactttcaagaagcccctggaagaaagccaataggatggtgaagcaaagggcttaaatgaaaaccaatttttatttagactcagattctatctccttgcaaaactttttgtaatagtaaattccttcttggtttatgtgcttcatatgtttactatactttatcactgaaaacatcctttggtatagtgattcggggagaaaagaaaaaatagttgactcctgttttctgcgtctccacttgtcttcatggttgtgttgtttcagccggaggacaatgtcctgatgttgcttaaaatctcagaaagggcccatctcctccgatttagacctttaactcttctcagattaagatatttgaactaaatttgttgtaattttgtctattaactaatccttagagctgcgttgcaggtcccacaaattatctccctctggagcagaaggttaaggggttaatcttggtaatgatattggataacgggtactctctcatgcatctgcctcacctctcaaggtttttgttttttgtttgttttgtttttttgttttgagacagagtccagctctgtcacccaggatgaagtgcagtggtgtgatctcggctcactgcaacctccatctgctgggttcaagtgattctcctgccgcagtctcctgagcagctgggactacaggcatgtgccattctgctgggctaatttttgtatttttagtaaagatgggttttcgccatgttggccaggctggtcttgaactcctgactcgggtgatctgcccacctcggcctcccaaagtgcagggattacaggcatgagccactgcactcggcctaaaaaccactttttttgtttgtttggtttggtttgagacacagtctcactctgtcccacaggctggagtgcagtggcgccatctcagctcactgcaacctccacctcctgggttcaagagattctcctgccccagcctccaaagtagctgggactacagccgcctgccaccacgtctggctaattttcgtatttttagtagaggcggggtttcaccttgttgcccaggctggtcctgaactcccgacctcaaatgatccgcccacctcggcctcccaaattgctgggattgcaggcgcgagccaccttttatcacatctcattttatgttagtgaggttatttagggcgaggtcccttgataggctcaggttagggctgaccaccacaaaaatcaagtgactagagggttggagctttcagccccacccattgactttcaggaaggggaagtggggactggagattgagctctataaaaaaatgttggctgggtgcagtggctcatgcctgtaatcccagcactctcgaaggccgaggtgggtggatctcaaagtcaggaattcgagaccagcctggccaacatgatgaaactctatctctactgaaaatacaaaaattagccaggcatggtgatgtgcgcctgtagccccagctactcaggagactgaggcaggagaattgcttgaactgcttgaacctgggaggtggaggttgcagtgagccaagatcccgccactgcactccagcctgagggacagggtgagactctgtctaaaaaaaaaaaaggtagacaccaggcacggtggctcacacttgtcatcccagcactttgtgaggccaaggtgggcagatcgctttaagcccaggagtttgaaaccagtctaggatacatggcgaaaccctgtttgtacaaaaaattagtcaggcgtggtatctcacgcctgtagtccccactacttaggaggctgaggctggagaatcccttgagcccagggaagtggaggttacagtgagcagcgatcatgccactagactccagcctgggtgatagaatgagaccctgtctcaaaaaaaaaagaaaaaagaaaaaagaaaaagaagaagaaaaagaaaagaaaagaaattagccaggcatggttccaggtacctacagtcccagcaactcaggaggctgaggtgggaggatcacttgagcccaggagtttgaggctgcagtgagctgtgactgcaccactacaccccagactggggaagagagtgagatcctattaaaaaaaaaaaaaaaacccttgagaaatgagattagatgagcttcttgagttggtgaacacaaagaggtgccggaaggctgagtgcctgaagagagagcatggaagctccatgtaccacctcaacctctcccttgctatatacttgccctatgcatctattttgactgtttttgagctgtattcttttctccttttttttgagacagaatctcactctattgcccaggcttggagtacagtggcatgatctcggctgactacaacctcttcttcctgggttcaaatgattctcgtgcctcagcctcctcagtagctggaattactggcatgtgccactacacccggttaatttttgtgtttttagtagagacaaggttttgccacattggccagactggtctccaaatcctggcctcaagtgatccaccagcctcagactctcaaagtgctgggattactggcgtgaaccaccatgcctggcctaagatgtactctttagaataaaccaataaatgaaagcaaagtgatttattgtgttctgcatgccattctagcaaattacaaagctgatgagggggtcacaggaacccctgatttatagcccatcagtcagaagtacaggtggccacatgggacttgcattggtatctgaagtgaagacagtcttgtgggagtgagacctttaacttgtgcgatctgatgctatctccagttagacagcatcagaactgaatttcattgtaggatagacagtggtgtctccagagaattggagacttgctctgtttggaaaaaagcccacacatatgctgttagaagtatgtgtgtaaatagagaagtgagtttttgcttaatcatacatctttgttgtttattgttttcctctcattttttcaccttggtaattttttgtttcatttccctgaatctctgaagaagaaagggcctggactctcatattccttgacccttgttatttggagggatgaactccagtctcccacagaaggttagaggtgaaggaacattcagacacataggtttctaagatgagtagtttgatgacatctccaaggtgtcttctgggaatggtaagaaaccctgagtttctgtcactggattgattccagctccattgttcccttgtccttcagcaaagtctctgctgaagcctattatgtaaaaatcacaggacaccattggtttaaactgagctactgtactacactcaacaaacaaaaccaaaatagagtcactcatactaaagttctatgtcaccaaaccaaaaactaagttgtttatctggctttccaagaaatcataaagagagagagagagagagaaaatagccaaattcccaaacaggtcactttcagtagccatgaaaatgcctctgctttaatccttacaaaagaagtaacgtaagtaaccatgtcagtcaatctgttttgtttttttttttaaattattgtttccctattcccactgtatggaaaaagcaactttgaaatgaccattcagcttttttttctttgtttctgctttctttagccctcctctccctataaaatcaaacttctctgttctactcatcaatacaggcattctgttttgagggatgaggtgttgtctgattctagaattatgaataaagccaataaaaactttacactaaattagttgtaattttgtcttttgacaaatccttggagcttgtgttgctcgacaggaagccagggactggccacaagaaaaggaactcagctagtggtaagttggggtctggcaatctaaaaattattgttggaatgcctgctgtatgacagacatttcctaaactctggagcagggctgtgcgatgaagtatctacttgccaaatacagcttttttgttttgttttgttttttcagtcttttttttttcttttttcttttctttacttttcttttattatactttaagttttaggaaatgatgagttcacgtcctttttagggacatggacgaagctggaaaccatcattctcagcaaactgtcgcaaggacaaatacagcttttgagtgcttgctatttttctcatttaaccttaagtgtgctataaatataaaatgcatctcatgtcttctaagacttagtatgaaaaaagaacgccatgtatctcattaataatttttattctgattaaatgttccaatgataccctttttgatatataggattcaagaaaatatattattggtgttaatttcccaaatgtttcctactctgtttacacatggttacctgaaaactataagacacaaacacggcccgtgtttacagaccacattgtgtttccattggacagtgctatgctagagacacagcactgaaagaaggtgctacttgtggagtttgtatatcagtgcagaaagtatttatgatagaaaataaatgaacaaacaaataagaaaagcatctggtgacataggctggacctggggcagctgttttgcaaatgggttaagagaatacctctgaggacaagatatttaagctaaaatataaatattcagaaagagccaggtgtggaaaactccagaggaagatcatagtaggcagaaggaagagagaaagcaaaagccctgaaatggcaagaagctggcatggtcagggaatcaaggagtccaccatgggtccagcacagtgtgtcaggtgagagtgcagagatgaggtctggggatacacaagacaaatctcagggtgcttgagaagtgtgagttagaaatgtggaagccatagaagagtgctgagaagaataacatcattgtcttatttttccttttgaaatataatttgtctgtgtctggattttagcagagggaatagcaggaccaggaacaaactatctgcaaagtttgtacaaatatccaagcctgacagggccatggacatgggtagtggagatggagatggctctggctgtgcattcagcatgttctgtagatataatcaataggacttggattgtattgggtggtaaggaaaatgaaaggtgagttctacatttagagctttaataactgaatatttaaactccaaatagatacagaatattggaagaatggcaggtttgggaggaagggacaagcaacagtttagtttgggcaatgttgggtttggagtgtctatgggactgcaggggagatatcaagaagtcaattggttatatgagactagagctcctggggaggccagtgctaataattcagatgagaggatagcatggtactttaagctgtgatactgaatgatatcacctatagaatgtgggacaccctaaatttagagacatttagagcagaaaactggactgaaaagaggtggccaattgagctgtaaagacaaccaagagtggattgtgtgtacatcttatcatcttatgatatggaaaaaaaatgtgtttgaagtaggagaaagagatccagtggttcctatgtcactggaacatcaggataaaaactgagaaaggtccactggatttggcagtctggaggtcatgtgtatccttaggagagtgcattagctggagtgctaaggactaaagtcaatatagaatggattcagcagaataggtgaggtgagaaaaaaaaagcaagcaattagagacaaccatttctaaagtttggctaggaattctctttacagaaaacacttctcttaaagaaatagggttgaagcttggaaagaaatatgggccaagattggtttctttttaaagggaagggataggataatggttacttggtaacaagaaggatctagtagaaatcaaatcttgagggtttctttttagcagaaagcagaaggacaaataccatttcttgggaagacgagagacagtgggatggaaagcaaatgtaaagagggaagtcactgggaaaaagaagtctttattcacaatagcaagggcacgtaaattgagggttaggaaagaaaaggctaaaaaatgcacatctaattgttacagttttctcattaaaattcagccaaggccatcagctgagagtggaatagtagaggaagttggttagtttgaggagaaagcagaagggctgaatgttattttaatgcatcagaaatcacacgtgctggagaagcacagatgctaacaaggaagtgccgagtttccattatagattacattccaatctgtaatcatacatccagttgtacctctcaataattgtgacattgaacaagtcacttcccctctctgagccatggtttcctatggattatacaagaacaatatttgtcccagagcaaggatgttgtaattagaaataataaaatacacattggttgatacacattgggattgcaccaaatagcagccctcataatcagtacaggtatcatctctggtccacggttctcttctccactttgtaactagggtggatccaaaattttacaacattgtcttgttggcctgtccccacctgtcactgcacattgttggaatgtgtcaacatttccaaatgacttagagattattgatacatcatactgtctgaatgtcttctaggatatttggagagtggtagagaaaatctgagtctgttgaggaactagggaatgggagagggttaaccatacaattctgttgaaatcagtctgattgagctccaactctggttctacccctttctgactgggggctttaaataattaatgtaaccaatataagtcaacttcctcatgtgtacaatggttatactaattaaaactaaggttagtcaatattcaccgtgtctcaaggtgtgctcagtgctcacacagattaacacgtctcatctgcagaggctgtgagagcagttgttagggttaaaggagaagctcttggcatgtgagtaatgttcataagtagtagccactattgctatgagcattgttcttgtcctgaccttgagcttcaaaaggcacgacccaggattgagccccatgacacagcacacagcctggtgaggaccagaagttcccatttgtcacagacactcagtctagcctagaagatttccatgtccagtctcacttaatcctcacctgaaagttagacttcaccacaaaactgtccttgttctgcagaggagaaaactgaggctcaaagagatatcactgaccaagaacccatattggcaaggtgccaacgataagagtagcgatctaactgaccccaaagcccagtgttctttactctgtaacagtgatgctcaactggggggagttttgcctcccacgggacctttgacaatgtctatagacactttcagttgtcactcctgaagggggagttgctactagcatcggtggatagaggccaggggtgttgctaaatatcctactgtgcacagaacagtcccccacaacaaagaattacacagccccaattgtctgtagtgccaacgttgagaaaccttgagctacattaaacaatgtcccatgaaagacctcagtgaaagtgactggtaatgacaggaagaaaagaaggaagagagaaagggaaaggaggaaaaaaccatgatactagggtatgaccacatgctggaaatatctggggaactcctttcaaatgcagcattttagagttgcaacggtagtggctctaaagttgctcatcctgaatttcaaatcttgctgcctccactgaccggctggacatgatgctgaaaaaaaaaaacctacaaaaaccccaaggccatgaattccctctggtacaaaaaggggtaatgatggctgcccacaatgttattatgagtattatttgtgaacaagtgctgtataattgctgttacttttagagaggctggatatcccaaggtaggaagagtctctaattttcctggccataaaaatcactgtagcttttacacagagagattctagagttgggttcatgaatatgcattttaacaaataccttggatgtttctgatacagcccacagaccacagtataagcaaatttggtcaagtggcaaagacacaagggacacagagacctttgggttgagttggatgcaacagcttcccatgtgacctggtgcagaggcagggactgtaattttgtgattctgtttcttaaaagcaaggaaatagatcccagaaagatgccaggatatcctcccatagtgttattgcccagaatttagtcatgtttccaccaataaagcaatcccttgcaaagcaaaaggaattctagttagaacaaattagaaaatcaagatatgcccgcaaagatggaggagggataccttcccccaaaagagtgagtaactgaacaaaattgcgatttgatttgcagagaagaaatgaggaacagttatttgtggggggagggggcatcaccagcaatatctgtcagaattgttgcatagagaaagggcttagaagtcagactaagctagattaaagatctttgtctactgtttcctacttaagtgaccagcagatttcacaattgctctcaacattgagtcattcctgtggaaactacaaacaatgaatattacagagctactatgcagaccaaactacaacccatatgtagcaattaacacagtgaatagtctctgataagaaccctacaaatactagctaaatattcatgctcattctgtttatcccacagaccttgaagatatacaacggatgctaagtagggacaatgaaaagcagacgggagaaagtaaatatagggccctctttgttgacttcatctagcacagaatctataggatgtaatatatttctgctctttttttttgtggggggaaatggaatctactctgacatccagactgaagtgcagtggcacgatcttggctcactgcaacctctgcctcccaggttcaagcaattctcctgcctcagcctcctaagtagctggagttacaggctcttgccaccacacctggctaatttttgcatttttagtagagatggagtttcaccatgttggccaggccagtctccaactcctgatctcaagtgatccactctcctcaacctcctaaagtgctggggttacaggcatgagtcaccacgcccggcctatagcatgtaatatatgtctatatattacaagtaatggttcaaaatcctcttcagctaactcaatccaaaccctaaaacttcaaattaaatatcaactaaaaaataggtcaagggtcctcacagtgggagggacaggagctgggagactgggagagcatggggccgaaagaagttgcagagcttgccagcatgtttgcattgagtgatggaggccacagatgtgaaccttctgactctgagtcttgtgccttcctcacgaagctgaagctgcctatgctcaattttccattgtccatacactctcagttcagtatttccgctggtggacagagccctttaatcctcttggtaatcagcttgataggtggcatgcatattaataatgatgggaatatagagaactatcgtttcccaaaggaactccgagagagtgccaattttatgttataaccattcacaaggctcactggggagggtctgctggtaggaggaggagctacagtggaagttaatgaatagttgtattgtaagatggtgtcacagctgagaaatggccattgctgaaatgtttcaggtgtgggaagatggaaaccaacttctccattcctctgaatgaaactgaggaggtgctccctgagcctgctggccacaccgttctgtggatcttctcattgctagtccacggagtcacctttgtcttcggggtcctgggcaatgggcttgtgatctgggtggctggattccggatgacacgcacagtcaacaccatctgttacctgaacctggccctagctgacttctctttcagtgccatcctaccattccgaatggtctcagtcgccatgagagaaaaatggccttttggctcattcctatgtaagttagttcatgttatgatagacatcaacctgtttgtcagtgtctacctgatcaccatcattgctctggaccgctgtatttgtgtcctgcatccagcctgggcccagaaccatcgcaccatgagtctggccaagagggtgatgacgggactctggattttcaccatagtccttaccttaccaaatttcatcttctggactacaataagtactacgaatggggacacatactgtattttcaactttgcattctggggtgacactgctgtagagaggttgaacgtgttcattaccatggccaaggtctttctgatcctccacttcattattggcttcagcgtgcctatgtccatcatcacagtctgctatgggatcatcgctgccaaaattcacagaaaccacatgattaaatccagccgtcccttacgtgtcttcgctgctgtggtggcttctttcttcatctgttggttcccttatgaactaattggcattctaatggcagtctggctcaaagagatgttgttaaatggcaaatacaaaatcattcttgtcctgattaacccaacaagctccttggccttttttaacagctgcctcaacccaattctctacgtctttatgggtcgtaacttccaagaaagactgattcgctctttgcccactagtttggagagggccctgactgaggtccctgactcagcccagaccagcaacacagacaccacttctgcttcacctcctgaggagacggagttacaagcaatgtgaggtcggggatatttttgggctctgtctctttctaccctgcgttaagcggaaaaaaaaaattctgacagtgtttttcttcctctttcataccaccaccaccacaatcatcaacataaaggaagtctgtaccaaatctgtagggggtttttcccacaaccaagcaatagacaccagctgggtgtcctacaattaaattccaacactatctacctggagctactgtcagatcccacaggtttaagggctcattccccaagtctgctcctccagttgagacacaagtcacaaatccaggcttctgaaacttcggaccaaccagcttcaatcagggttcccactaccccctctttgggggtagagtggctcatggaactcagagaaacatttatttcggcttgctggtttattataaaagcaaggtttattataaaagatactacaaaggatacagatgaagaggcacatagggcaaggtacggggttccacgccctccctgagtgcatcaccctctgggaacctccgtgtgttcacgtctcatgaagctctccaaatccagtcctcttgggtttttatggaagcttcatgatgtcagcattctttcctccagtgtataggatgggatcctctctggggagggtcttaagacccacaattagaaaggcaagggaagattagagtcctgctttggggtagatgaaaggaaaggagagagattctgtttcctgaggcttaatacacccaacattataacaaaggactgtagcaagggctatgggagttctgaagcagaaaccatgggctaaaaccaacatacatcttaataccagataccctaatcccagtcctaacttcatttaaccttggtcacattgagtcattccaggatgagtggctcaagtatttcctcagggaaaatacttctgtgccccctgatttgagggtaagaagtagataatgaggccactgtgggtgttattttttcatgtctggacctcagcctatatcctgagactaagtggaagtgggaaaagagtacaagagaagagacaaagtggggatatttgtaaggcttagatgagatagtgtttttttagaaaaaaactttatcttaccattaagtaaaatgtttgccataggctttctggggctttctctttttaaagtcagactgttgaaggtttcttctattcttatttgttaagagttttcttttattgtttaaatcatgaatgaatgttgaattttattaaatgcagtttctgtaaatattaacgtgatcatattatttttattctttcatttacataattataaattagattaagttttcaatgttaagctacccttgcatttatgaaataaaccacgcttgctcatgatggtttttgaacatttataatctgtctcacagatttgtttagaatttctgtatttatgtttatgtagagatggctctgttatttcacttttctctactgtccttgttagcttttacataaaacttagttttcctgaaaggagtttggaagtgattttctgattctatcctcgggtattatatctttgttaaacatttagaaaaatttgctagtgaagccaactggatcttgggtttgctttttgggaaggcttttaaatataggttcgatttctttaacaattattagacctggcagttttctttttcacattgttcacttttggtaaactgtgattttcaaattcaaggaatttggccatttcatcccaattaccaaacttttgtaatcacccagtgggttctccctgcctgctgcacagacaaaaccagtttactgagactgtagtattgcagtaaagaaagatgcagtattgcagtaaacatgatgctggccacatggatgaactggagttatcagtcaaatcagtttccctcaaggctgagagattatggtttttcaaagatagtttggtgggcaggagactagggaatgggtgctgctgactggttgggaaggcaatcataggagagtggaaagtggtcctcaagcactgagtctgccttggagtgagggggtcacaggaccacttgagtcataagtcatgagccctggtaaggtcagtcagttgctagaatgcaagtctgaaaaacatctcaaaagactaatcctaggttctacaatagaggtgttacctatagaagtgattggggaagtcacaaatcttggtctttactgcccaggtgtctctggccacatgacgtctggcaataaaggattatagaaactataatcctacattttagcagaattcagactccttgaataatcctaatcttagggcctttcattacttttcagtctcagagcaagaagggtgttagttagggaaggcctactatcatccttgcttccatgttaaactataaactaaattcttccccagttatcttagcctacaaccaggagtgaacaaagacagataacctttgaggctagaggcaggaaggagtcagccacgttagatttctctcactgtcaaaatttttgcaaatgtggtttcacttattggcatgagacagtataataactgtatggtacttgatatgtttctttcaagtaatgagaatgtaagctatctgagggcaggtattttggtctatattgtttgctgatggatcccaatcccctgcaaataagatagtgtctgatatgtgataggcactcaataaatgtttatggcattgataaacaataatatcacttaatgtccagtcaaaattatctccagccctcataatatgaatcaggtcaggtctagtaaattcccatcctcatgtccacagtatttgtaaattcccagctggcttacattttcatgaacatttctgattttgagtttctgcttaagtaaactactctggttaaccattgcctaaagacttcatatttaaataaataactcataactcagccctttaccttgctttctgcacataaacactcagaaattgtcaattctgtattgtgaacatactttcctgatgcactggcaaaagacaccactcaacatgaatatcaggcaatcctgttatcagtgttctcactcaccccactgctttactcattttcttctccttttcccttctgtctctcctaaagttattgcatttccaaggcagagcactttgcgcatttcatttgcacgtttgactcctataaatgctttagagttcccaggaggtgtatattcttaaatgcccagccaaggtgtagccatagaaaataaggaacaaggctgggcatgatggctgactccagtaatcccagcactttgggaggccgaggtgagtggatcatttgaggtcaagagttctagaccagcctggccaacatgttgaaacgctgtctgtactaaaaatacaaaaattatctgggcatggtggtgtgcacctataatcccagctacttggaagactgaggaaggagaattgtttgaacctgggaggtgaaggttgcaatgagctgagaatgtgccactgcactctagcctgggagacagagaaagattccatctcaaaaaaaaaaaaaggagaagaaaaagaaaaagaaaataaaaaggcacaaggacaaaacctagataggagagccagggcttccagatgggctaattaagagacttcctccactgccaggacaggggattcttactattccttcccactggccttggttaattgcagtagaacagtgcctgctacatcctctccatttttcttttcctctttaggagttttcattgtggagtctcaattcccattgcattatgatatattgtgggttcaggaaactgagattttttttttaaagttatgggacagttaccacaaagaaatacttcccaatgtatgtccatgtggatggctcactaacttcctgtatcaggcctggtcggtctgggacagcactactgcttgctggttttagattttttgttgctttgtgcaacttagtactgctgttgtcaggtgttgccttggggactctccagaaactctggtgaatatagacagctctctgagccttcaggctcccctgcagctcctggagggcaggtttcattgtaatgaggatgtttcgctatgaacagtagtcactctttctctaatcaggcccctggtgacaggccactacttgagggcacgttgtcccttgagctatatatgctgctcttgttacatggggtcttggtagtagtctggcctgtactgggtataagttgcaaagtcctggtctccagccagagtgagctggccagtatggtgaaactctatgtccatctctgccagggtccaacctggccgaatgacagatgaaaaatgcactctgagactgatatccagtgaaaaagcaggctaggggactgggcagctcacagacaccgaggagggagctgtaaagagtcagtagccacagccccgacaagctggcactgtgggcatttattcagtacagatttaatgacaaaggcctggagtcaacacgtcttgtgggtaattaacattgtcaccccccaccccccaagacagcagtcctgtgcacagatgattaaataccaggttccgaggcctaagtaaactaacttatctagatcaattcctttacacttccttgttatccattctgagaaaattcagctgccttcagccaaatcctcttctgaagctatgcaaatcccaggccttccaagaaggtttgcatccttttcctataatttatcttacaacttttcccaccatcctgaccgatctcctacacatctcactgatgagagagccacaggataccaggctcctgggtagcagcaattccctcatagtgaagtcagaaaagatgataaaatgctgggcttcagtgtgttgataaaggagagccaggatgaaaggatcaagtcacctaagcctaacctgtaatatggcaactgcacaagtccccttggcaattttcaagagcaagtgctgctgaggccagtgcctccttggttgctgcattccttcctgctatcactccttgtccccactagccactcagaggtcaagtggggcaccttcaaaagggaaacaactgcccacaaggccagtgcaaatggagctcacccccagatgtttttagtaacaatttgtaaagtcaaaacaacagggtgccaaacccaaggtcatctagattttctcctgttatcttctaggagttttataattttgtcttttacatttaggtctgtgatccattttgagtcctatttatctggtggaaacctgactgacatagcatatgcttctagtgtttaaaaaaaaaaaaaaaaacagaggaaagatgaagcattaactaatataaattagtagaaattgagtggaagaaatgaaaatagtctctctgtctactttatcatgccattttctttttgtgtttttgccatcagcatatacatctgttctctaatctactaactgaaaacataaaaaccttttgtaccacacgcgtcctcctgaactttacaacaaatttctctgctctccttgacagcaaactcaagggtcacttccagtttctttctctacttcctcatttcacattttctccagaactcattctaaatgggttcatgtcctgattactgcagtgggactactcttatcaaggacaacagtgacatccattgccatgttactgcactgcaggttcagacatttggtgcttgcctatgaatccaatggagtaaatctaagtcatatatgcttatctgataatgatgggaatcttaggcccctaagcatatatgactcagttgtccacacccttttattttaaaatatataattctcttggtgacatcacacttgtttggttttcttcctacctcagtgatttatctttctcaatctccttgactggctcttttctgacttttaaatgttggtgtacccgagggctcaattctagacccccctcatctatttgcatcaatgcagtcatcctaggtaatgtgttcctataacttgaaatcccatctgtacataaatgactccccctaaacatccatcataatccacaacttctcttcaggactccagactggtatctacctccctcctctgcatttccacttgaaaacctatggggcatcatcaaagtaaaactatcaatttgattccccctgaaacagttgcttgacaaatcttctacatttcttccaaatttaggaaaagtcatcacactctaccaaatgtcttaagtcccaaatataagtaattattgattctttattttatttatttattttttatgagatggagtctcactctgttgtccaggctggagtgctgtggtgcgatcttcactcaccgcaacctctgcctccaaggttcaagcaattatcctgcttcagcctcctaagtagttggggttacaaggttcatgccaccccgcctggctaatatttgtatttttagtagagatggggtttcaccatgttggccaggctggtctcaaactcctgatctcaagtgatccacctgccttggcctcccaaagtgcaaggattacaagcatgagccactgcacccggcctattgattcttttaatctaatccatcaccatatcccattgactctatgtcaaaaacgtggaccaaatctgtgtgtttctttcctgtccactaccacctgacttcaaaccatcatcatccggaccactacaatagtttcctaatctttctgcattcactcttgctctacagcaatcagttatttacacagcagccaaagttttttttttctaatataaacatgatcgtgcccatctcttgattaacaccctccaatagcttcccatcatgctaataataaaaacatctgaatccactatctgactcccaaagcctcatattatctggcttttgcctgtccttctgatggtcttcctcaacagtttttctttcatcgattatgttagtaattacactagtaatatctttatttctcaaacataccaaatcattcttgtctcagaatctttgtactaactgttgtcctgcttggaatattcttcctcttgaactttcatgtgaccagttcatgtaattctaatctcagtttaaacataacctcctcagaacatttttttctgagtccctaagataacgtagcctctcaggctctctccagtctagttcagcaaatattttagttcttttcatagcacttgttgtagctttttgtcaatcacaaaatcacctcccttctctcattctttgctggtctgagagcctttgacgcctctgtttttcttcatctattgtagcagcctccacattcatctgtcatttttcagtgagaaagagagtgggtatccagaaaatgaggtctgaaccatatacagcagagtttgttaagcctgaggtagacacctggtagccattaaaagatacagagcaatgtgatgatctgctctatttttttttaatttgtattgagtctaaagcttaaccataattttctttttttatttttattttttatttttttgagacaaggtcttactctgtttcccaggctagagtgcagtggtgcaatctcagctcactgcagcctctgccccctgggctcaagtgatcctcctgcctcagcctcccaagtagctgggactggaggtgcaaaccaccatgcctggctaatcaaccataaaaatttttcatttttatgaagtccaacttattccttttttacagattgtgcttttggtgtcatgtcaaagaattctttggttagctcttggtcctggacattttttaatgttttctcctaaaaatgtagtagttctacatttaatatttaaatctataatccatctttaattatcttttgcaaagaatgtgaggcttaggttgagtttcttttttgttaatatttttaatgtccaattacgccagtatcatttgttgaaaataatattctttcttcattgaattttttacgtatgtcaaaagtcaatattgtgtgtggatctatttccggactctattgtgttccattggtctgtctaccgtttagccaatatcacactgtcttgataattgtagcttaatagcaagtcttgacatactccaatgttgttccttttcaaaagtaatttggctattttagttcctttgcctttcgatataaatttttagaattaggttaatgtttttttaacttgaatcacattgaatctatggatttgcttgaagaagaactgatgtcttaatcatattctgtctgcagtactctcttattcagtactaatctttcaactctatctgccttgttcttcccaactcccaactttatcttcttatttcaaagagtctaccgggctctacctgtgtttcccctcctactctgtggcctgggaactctctcaagtcagtaatcaaggcaatcacgggaatcatcttatttgtttccccttttttggagattacaatgctatactacctgttgtccagtgtcagaaaaccattctttcccattttccctagatttttagttgtttaaggtaggagcataaatctggtctctcttatgccatcaccgctggaagtagttatgttgattgtgttttaaaaagtcattttttgcttctgttcatggagagagagagctgtttgcaaaagctagttcaggcatccagacaagagatggcatgagcctgtaggtgattcttggggtgcataaaatcagcagcacttggattttgcttaccaaatgagagaaaaatcaataataaattttagacttggcacttaatctactgagaggacaatgcctctgattcctaaaagaaagaaaactgaggaaggggcaggtcagggaataggagaactggggatactgttttcagaatgtttagtttgtcatgcctactgcttgtgttcacagaaattccaagaagttgactgattttatgaggctggaattttgggaagtggtcagggctgatggtttagattaacagttaggggtacaatatatttttttcttttagttttagttcacatcgtaattgtacatgtttaagggatacagagtgatatgttgatacatgcatacaatgtgtataatagtcaaatcagggtaattagcacatccatcacctaaaacatttatcatttctctatgtggtgaagattcaaaatcctctcctctagcttttcaaaaacacacaatagatttttttttttctagccacttatgtagctacaaaaatagtactggagtaggggcagggtcttgctctgtcacccaggctggagtgcagtggcacaatcatagctcactgcagccttaaaaccctgggctcaagtgatcctccacctcagtctctggagtagctgaggcatgtgcagccacactccttttatttatttatttgttttgtggaaacaaggtcacactatgttgcccaggcaaactcctggcctcaagatacagagaattaaaaagcacaatcaagtaacctaactgacatttataaaccatttcttacacctaagagtaggatatttcacataatacccaatataattcttttcaagtgctgggttataaaataagttttaataaaaatctaaggctttaaattatactaagtatattccatgaccataatctatcaaattaaaaaccagcaataacaacataactagcaaatgcccaaatctttggaaactaaacaacatatatgtaaataacccatgggccaaataaatcttaatgaagattagaaaatatttttaactgaaggataagaggagtacatttcaaattttgtgatttaaagctaaagacagtgtgcacacgatttttttttttaagacagggtcttgctctgtcactcaagctgcagtgaagtggcagaatcacggctcactgcagcttcaacctcttgggctcaagcaatcctcctgcctcagcctcctgaatggctgaggttataggcactcaccaccacatctggctaatttttaaatttttttgtagaggtggggtcttgctatgttgtccagactgctcttgaactcctggcctcaagcaatcatccaacctgagcctcccttacaggggaatttttaccttaagtgtttttattagagaataagtgtgtgaactcaatgatctaagtttacatttcaagaagctagaaaaatatcaaattaaatctaaagaaaatataagaaaataacttttaaaagtggaaataaatgaaatagagatcaatagaagaggaaatattaaagttatgttaagatatcaataaaatggataagtttctagcaatactaatcaagaaaaaagagaaaatacaaatgaccaatcttaggaatgaaaaaaggaacattattacagagactaaacacactaaaatgatattacaaatcactttataacattatatttgacaatttagatgaaatggacaaattccttgaaaagcacacatatgaaactgtcataaaaagaattagaaaatctaaatagtccaatacctagtaaagaaattgaatttctaatcaatacccattaaaaaaaaaaaaaacttcaggcttgcattgtttcacctgtgaattctactgaatatttaagaaagaagtaacatcagtcttacaagaaacacttccaaaagacagggaaaaaaggaacacttactagtttacttttaaatacatctgttcaatacaaaaattgtgcttgaagaataaagtgatttttatgaactgaagttaaaattaatattaataaattttttattttaaccaatatttcagaaaagttatgttttcactgacatggccagacataactgaaatcagtatctttttttttgagacagtcttgctctgttccccaggctggagtgcaatggcacgatctcggctcactgcaacctccgcctccctggttcaagcaattctcctgtctcagcctcctgagtagctcgaatcacagatgcctgccaccacgcccagctaatttttgtatttttagtagagatggggtttcaccatgttggtcaggctggtcttgaactactgacctcaggtgatccacctgccttggcctcccaaagtgctgggattacaggcgtgagccaccgcacccgaccttgaaatcaatatcttaagtaatgtttggatcatgcaattttaaagtgacacatactttacacattagtggttttaaaaagtttttctcacattgatgtcatggcaataaatggaagaaaaaaatacctagttcttgaaaacaataataaaaacctttgtttctaatgattactcatcatgtggaaatttgcagtgaaaccaaaatgaagccaagtaatttaatttctactcttcaaaaatctctgtatgtagtatttctggagtatctgactagtataataaggtttttttgcctttattgtcagacacttcattaaatcttaaggtggtaaaaacagtgtgaaatcatcataaaatcttaccattcaaataaatgtacttatgttttacactttttgaaatagatattctgacgggggtaagataatatctcattgtggttttgatttgcatttctctgacgatttgtgatgtttggcttttttaatgtacctgttggccatttctatgtcttcttctgaaaaacgtctattcatgtcctttgcttacgttttaatggaattaccagttctgttgttgtttccacacgaacattttcagatgaacattcattgagattttattcataaaagtcaaacctggaagtaactcagatgtctgtcaactggtgagtggatacactatagcatatctgtatgatggaatgttagagttaaaaaggaattgctaataaatgcaacaacattgtgaacaaaagttcctgaaaagggctgggtgcagtagctcacgcctgtaataccagcactttgggaggctgcggcgggtggatcacctgaggtcaggagttcaagaccagcataggcaacatggtgaaatccagtctctactaaaaatacaaaaattatacgggcatggtggcacgcacctgtaatcccagctacttgggaggcagaggcaggagaactgcttgaacccaggaggcagaggttgcagtgagcccagagggcgccactgcaccccagcctgggtgacagagtgagactctgtctcaaaaaaaaaaaaaaaagaaaagaaaagaaaaaattatctgaaaaggaatgtgaaggaaacagactttattccagcaaaaggctgcaaactacagaaacacaatctttgttgtaaaatgaaggtgtgttccagggaacagagggaaggctccggttttaaagcaaaagtttctgcccaggttccctatcacctatgttgctatcacctatgttgatgccaagaaagagtgaaacttacttagttcttattggttaacacagctcagtcctgattggttgatacagctgagcgctgattggccagggaaggtgaactctgattggttgcttcaggtgagctctgattggttggtttccaagccccaaaattaaaaggtgtgagttttgaggggacttagagtacctgtatgacctctagacagcaaatggctggtaggttctattttaaatttaagcccaagtaaccatacaggatccatcccaaaagactggctctttcaaattcacatttgttcacaacatgaatgcatctcaaaagcattatgctaagtgcacaaagtcagacacaaaaaactatctcttatataattccatatgtgtgacgttctagattacaaataactatagtaacagaaatgaggtgagtggctgtcagggaacaggaggtggggaaaggggatcaataattgcaaaggggcacaaaaaaactttggagtcaatataaatatctattttcagatgatggttacatgataatatttatagtccattttcatttataagtatagctacaaaaatcctaaataaaatattagcaaaccatatcccaaaatatatagaaaaatattgtactatgactaagttgcatttattacagaagtgcaaaggaactgatttatgccaaccacctgactgagcttggagccagcttcttcccccatcttcagataaaaacccagcccagatgacaccttggtttgattttgaccttgagatcctatgcagaacattcagccaaacgcattcagatgcctgacctacagagctatgagctaaaacatgagtgttgtttcacactgctaaatttgtagtcatttctacatagcaacagagaacaaatacaaatattataatactatttataaaacttaaaaatctaaatattgagttctttaggtatccacatataagtgcatatttctaaaaatcaaggaaatcacatacacaattctagatggaaatttttagcggggtgggagtattggaatgattaggcaaatacacgattgatgcaaagatgggacagaaatgaaagactgtcattagcatattatcaaacattacctttattaagcaaaaaaagccaatggttaaatatgcatttaaatgtttaattagaaactaaattattcgttgtgcacatgtaccctagaacttaaagtataataaaaaatttttttttaaaatagccattctccctggtataagagggttaaaaaaagaaactaaatttttatatttattatataattatataaatatttatatataagtataaacataaatatatataaatttatattaaattaaatagaatttaattttaaatttaatttaaaagtttaaatatgcgtttaacctgatctgctttatgtatttaagaaaatgaaatatccatactatgcagttcaatttaataacatagtacaaaagataagtttggtatagatggtaaattgtagatgcttttactattactgcctggttttttatttacaagcatgtaacaatttttgtaataaataattgttgtaaggagatctttatttaaaatcctcagaagttttcaaatatgtactcaaagataaattcatataggaaaacgaactatatgaaagcagaaaaggaaaagttaattagataattaaaattgccacagaaaggtatatatttgaataataataaaagaacatttctcaattatctactataaaccaggcactttgctagcatttcaggcacaccattccaataatcttcaaaagaaatttgcaaaggagataccatcattttttcctaacagtaaaacttacagcatttcaataccttgcccaaagtcatgcagacagtaaatagcaaaatcggcataaagaatcaggactaaaatgttatttcaaaggattcatcaagaaataaattatgttagccaggcgtggttgagcatgcctttagtcctagttactcagcaggccgagacaggaggatcacttgagcccaggaggttgaggctgcagtaagctatgatcacccctctgcactccagcctgggtgacagagcaagactctttctctaatgattaaacataataataataagaagaaattacacacacatacccatacacatataccaagtatttatgacacaattttaataattgctgaatctaggtgatgggtacacaggtgaccaccatgttgctattccttcagtgtacttgaaaggtttcagtatgaaatgttgggaaatatggttgggtacttagtacagcacccaaatccctggcatctgaagcaatgaagtacctccttccccagcccttcccatcaccgatagccataatggcccccaactccgcatcgcttgctcgcttttcctggttccccagacaccgacttccactcgacgctgaggatgctccaatccagaccacagaagccctcagtggctaacccccagcttcagattccactgaccattccctgaagccttcttacaccgcaaacctccacaagtaccccatgctggtcgcatccggtcaaggaccccaacagcgctgggaaactcaccctacagctggagtcgcacaaacattcgcttgaggactagcaggtttccgtaacctcttcactcactgccgtagtcacgctcttgtgcagactcagtagcaccttcgcggaacacaagatgtctacagactttgaaaccaggcgtgcacatggaagcagcagtcttggaagatgcttcttacagatagcgagatggccattttctggcgactaaattccatcgtgctagaaaggaaagaggcaatgcagctgatcttctactgtccttttcaccacttccccagctgctaccagcagcgttgtgcattctcaggaacaacattcagcgttctcacctgtctacttcaaatctagcaacagccctaagccaatcacagacaagacctaagcagaagatggctgcacctatttagccccataggcccttaaagcagcaggtaaggcgcagccatatttgaaaaagttttgggatctgttgatcaaagactaggcagtggagcaaggaagtgggagcaggcagagggtggattctgggaatgtgtttgtcgagagaagtcttaggaaaccagaattgggtctggaggagctcaggtagtaagggggaagccacctgggtacatttgggtgtgggattgtggagagagaccttgaggggtaagaactgggccaaactggttgtggagcagacactgacaaccacaacccattccaagagaatattagttgtacttcagaaagatcatgtgtattctgaacagtcatgtgaaatagatgtaaaagtcatgaagaaattattagcaatcaaatctagcattatatgaaaagaatgaacttcaagatcaggttcccaggaatacaaggatgttttatcccttaaaaataaatacatgtaatgtatggtgccagccatgattaagtaagccccctagtttatcactcccactggttagagttaaaacttttgaaaaaaaactaataaaaactacttgagaacttttaaaatgaataattgcaaagagattggagaataaagtatagagttgaaaaccaagcaatgcacagagtaagttccctcattttttttctgtctatatctcctgcctttgacctaagggtaagacaaattaggaaattgttagtccaaactgcaccattttggaagccccccaccatttcacaaaacctgatcaaagtgaaacattccacagggggttcgggctgtgagaaacatcctgcctcttatcatattctgctgggagaaagtgcaaggaacaccactttccgcgggaatcgcctcatcctgggaacatgtccccccaggcccctctcacccaggcctataaattgccccagcctataagcggtgggcactggcattaggctgtttcctcacttctgcaggtcttatgctggacataaagcctgcatttgctgtagagccaccactccatgtctttctttaacccttgccttcccttcaaaacctaacagaaatttcgctgctgaggtgaagagcaaggacactaagaaaaaccagccttcatggccagaaaacagagaaaatgaatccacatgagccaaaaagtgtgttgtggggatctctattttattttattttttccgtttttctagtttttctagcatggtcttgctagttctactgttgaaactgcactgccacagtactggcagtgacatggacacctaaaactcaagaaaaaaaatctatagatagaaaatattaggcccgatgcggtggctcatgcctgtaatctcagcactttggggggccaaggcgggtggatcacctggggtcaggagtttgaggccaggctggccaacatggtgaaacctcatctgtactaaaaatacaaaaattagccaggcatggtggcaggcacctgtaatcccacctacttgggaggctgaggcaggagaatcagttgaatctttctgatgccaatcataagcttgccacattagttctagagaataacaaacaaaaaacaatgaattctaccattatcatgaaatggagagggatggaatctcaagttcatatacaagaaaaattcagaaagtgatctgcagatacacagtgtaagtctgagacattcaataaaagaaatatataataggcttgaaggacacaggtgtcatcaaacttggaaaagattctaggaatatttgaaagcatactagaagaggtctataaatattggtaggaggtgaagggtggttgtatctaataggctgcaaaagaaaagtgactaagcaaaaaggcaagggccaaataggcaagaatctcaaccagagggagaaagagaggcacatctcctatgagtcatacatagaaatatagtgctatggtctgatgtgtcccccaaaactcatctgctagaaagttaatcctcagtgcagcagtgacagggaagtggggcctaatgggaggtgtctaggtcatgagggctccacctcatgagcaagttaatgccatgataaaaaggccttgtgggagtgggtttgctactttttgctctcctgccatatgagaacccaacattcatccttacttgccgttctattatctgccatgtgaggatgctgcaaaaaggccctcagcagataccagatactggtaccctgatcttggacttcccagcctgcagaactgtgagaaataaatttcaattatttataaattaccctgtctcaagtattttgttatagcagcacaagtggactatgacagatagtaagaggaggagaaattgttcatattgaagacctcttttcacttatactctaagtcacccttaaaggttcacagaccatgagaaaatgtattaaaataacaagggtgccaacccatcaatggccaactagtactttggttccactaactcccatcgcattggtttcactcacctggactgcaccaacttgggaattctctctctactattccttgttcttctttccccaactggaatattgcttctggcttggtagcttgacaacctgtcaagaggtaatcacagagaatctgagcagcattagagcttgtgagaaaaagttctgtttcaggaaatgcacagtatacatctcagcagaacagaaacctttcatttggaaagtgaaattacatatggtcactgtacgattataaagtaaaaaaagttctaaaagtcaaagtccaaaatcattgaggatatcagagtacccacaaattgtggcaatagaaaaaaaggcaattaatcggcttacagtgagatatttaggaaagttgtctttacccagtgacactaggttgttgtaattttccaacatcacatcctggtagaggttcttctgaacagggtctaatagattccactcctcccaggtgaagtcaacagccacatcattgaatgatgataaaccctataataacataatccttttaaattctggagttaatataataaaattcagtctataagactcgtaggacattattctctttatctttaccacaaagattcacaaacgaagattttcctgtgcctagttttggtttgcactttgtgagtggaatacattaaaaactatcttttctttgtgcattcttcattcacttgtttactctttcattcatttgcccgatgtaaagtgtcttttaaacctttaaactacctaaaaaccatctgtaacccaccttaggagcatttaatgtaattcattatacatattacaataaaaacaataaaggttagtccttccttcaagtgtttctgatcttgcacagagtagcaaatacagtcctatgcagaaagcctatgtattgcatggtattatggattagcaaggactaagacagaagtatgctcaagctaatatgtgagcacaattaggtaaggccataattgttctgaagaggtagacaagctggtagcatgattagtagtgcgttctaaaggaagaagtggaagaaatgggggcttccttggaagggggcaacatatgtatctgtattaaataccattctgcgttcaaagaaatgcaaatagttcattaagacaggagaagctgaagagaagaaatgcccatttgaaaagcaggaacatgtcttggagcaaagggtacacatttccttaagatactcgatagccactacacttttttttttttttttttttttacataagtaagttacggtcagaattgcattttggaaattgtgctacaaattaaatgatgatactcataaagaaaaacagacttcttactatgtgctatgtatcattctacaaattttacatatattaacataataatctgcacaataacccttgtttaagcactattatgttctttttataaagaagagattttaagtttcctagctgtgccttttatatctcccacatttccttaaagattactgttcactgggtccatatgctggcacacaaaaactgaagaggaagaggaagatccatcagagacatttcttcacactggatgcccaggaaatatttactgatatcaacgattttatgtgctttctccttctggacaaagtaaatcttgtaacttttaaaaattctcttgtgatggttgtcagtactgccacaaaaatgtttgcaacttaattctagatcctgctacttatatggcaattgtctaattattagcacctttcaggaccctacgacatggagatagatctcccttcctaactggctactcttgatcatttattctgtctcctagtctaaccacatccctgccagccagagtgtacttatattcatttttctctttgattacatatatggttataaacttctaaaaatctactgggaagtaaataaacacctcacttggaactttgtcatgttcaagagctttcagaagatggccagtacttttagtatctgtttgtcctgcaattctgataatgtctcatcaagggtatcctcaacaaagatgaatttctggacatgagatatacttttttcctttacaggagctgcctcattctaagaagtcagcatctatgaattcaaacaaaaatgtgttttaaagtagaaataataaagagcaagtccgcgtaaataaaaagacttttctttttaaaattaattcatttcctatacctaacaaataaaattgtatgtatttatcagtacaatacgttgttttgaaataagtatatactgtggaatggctaaatcaaactaattaacatatgtattacttcacatacttgccatatttttgtggtgtgaacacttgaaatctattctcttaagcaattttcaagagtacaatacttggccgggcacggtggctcacacctgtaatcccagcactttgggaggcagaggcaggcggatcacctgaggtcggagtttgagaccagcctgatcaacatggagaaacccggtcactactaaaaataccaaattatccgtggtggtgtatgcctgtaatcccagctacccgggaggctgaggcaggagaatcgcttgaacccgggaggtggaggttatggtcagcgaagattgcaccattgcactccaacctgggcaacaagagcaaaactctgcctcaaaaaaaaaaagaaaagaaataatacaataccttgttatttactacagtcaccatgttgtacaatagatctcttaaacataaaagttcatgtcttatctaactgaaattttttattctttcaccaacatttccacaaccctctccctcccccagccttggtaaccaccattctactctccatttctatgaattcaataattttagatttcacacataagtgagatcatgcaatatttgtctttctctgtgaggcttatttcacttaacataatgtattccaagttcatctatgttgtcaccaagtgacaggatttccttcttttttgtggctcaagagtattccattgtgtatatatgccacgttttcttcattcattgttgttggacacctaggttgattacctctcttggctattgtgaataacactgcaatgaacatgggagtgcagctatatctgcaaagtgctgatttcatttcctttcgatatgtgcccagtagtaggattgctgcattatatggtggttctatttttttttttttgagacagagtcttgctctgttgtccaggctggagtgcagtggcactgtcatggctgactgcagccccaacctcccaagctcaagcaatcctcccacctcagcctcctgagtagttgggactacatgtgtgtccagctaattagtccaccatgcccagctaattttttatttctaaaaacaaataaatttttatttgagaccagcctgtataacacagtgagttcttgtctctataagaaataaaaggtatacatttgcataataatagctaccttttgtcaagtatctattaatacgtatttgcagatgagtcactggaaggtaactagggttagatgaggtcatgagggtgggccttcaatatggaattagtgaccttaaaagaagagatattggctgggtgccatggctaatacctgtaatgccaactctttgggaggccgaggccggtggatcacttgaggccaggagtttgagaccagcctggccaatatagcaaaaccgtgtctctactaaaaatacagaaaattagccaggtgtggtgcaaacgcctgtaatcactgctacttgggaggctaaggaatgagaatcacttgaacccgggaggcagaggttgcagtgagccgagatcgcgccactgcactccagcctgggccacagagcgagactccatctcaaaaaaaaaacaagaagagaatttgcattctccccctactgccatatgaaaacagatggccatctgcaaaccagaaaaagatctctcaccaaaactcatcccacactggcactgtgatcacggacttccagcttccagaactataagaaaacaagtttctcttgtttaagccactcagtctatggtattttgttatggcagcccaagctgactaatacattacatgccagcactttgtcagggacttcaaatgcactacctcactcaatcctcaaaacccatctgcaaggtagatattttcaatttgtcataatggaaaaactgagacttacagaagttgggtatcttgcccaaagtcacacaaaatagggtagaattgacataaaaagctagtactaatttcaagtgtatacaaacactcgtgtacgcacacacatgcacacacatagcatttatgacacgattttgacaactcatgaattttggttgtacaggttatcatattgctattctttcgagttttctatatacttgaaattcttcgacataagatattgggaaatataatacctcaatgtaaaatacagcacccaaatgtctgtacagctgaggcctccttatgttccagccccaccagcctctcccgtcgatgtccgtgttgctctccacccaagcatcttgctgttgcctcactcacacctccccagacacctactttcaagtggagcataaaacggaccctccaaatactcaaacttggacccctgaaacctcagatcactaaccgccaatccctgtcctcgccgaccacatcctgacggccccctccatcggtggctctcccaggcctctctctctgtggcagggagcacgatgaggagaggatatttcacgagaaacgagagaatggtctctagtttcttcctcaatccacagctctaaacactgatgccggccctaaaagccctcaacaaccccgaagcggccttaaacggcaaccccagatggtactcatcagaaaccaatcccaagtcacggaattcccacagcgctgcgggattcctaagggctttaggcagagtcaaatgtaatctcacacaggagtcccgtgaatttactccctggaaggcaaagcttccatacgtcatttcctcttctgctcactgggctggatggccaggctttccagctattatacaaactcagtagcactttggaaggccaggatccatctacagacgcggatcccggtcccaccaggaatgatcgctcagcaatatggtcgcgcccaagccctgacatgctgttggaagccaccatcttggaagacgcagtacagactgcgagacagccattctaggcgaccggattccgctgaccaggccgaaaaggagtaaatctaactgatcctttctaatcttctaaagacctctcatcctgtacttccaccttctttcctgtcagcgtagggcatgcttagtaggatttcggcactttcaactagtcttccgacctgaccaatcagaacacaccgaaacagaaaatggctgcgcccacgctgcctcgttcttctaaaccacacgaaaggtgaggccgtattgaaaagcctgggtccctaggggaaagaagggagggagaattaggaagcttgtacagctaagacgcggaagacgctgggaatatacccaaaggaaatgaaatcactatgtggaagaggtatctgtactcccacatttactgaagcattattcacaatacccaagatatggaatctttctccatacgactgagaaagatggagattaggagacctagaactggatctggacgaacagaggtggtatgggaagagctctctggatgtgtggtttgtggggagagatggtgagggcttaagaactaatgtaaagatgcctgtggagcagacacgggcaaccacaatccaggccacaagaaaagcatttgtagctcacagggatcctgtgtatcttgaagagcacaacccacccagacatttgtcaatactgtgatgcaggagtcaacttccttttttccctggctagataattatcccaacaacattatttaaagttgatctcttccccaatttgctaatattttgtaaggagttgtacatctaagttcatgggatatttggtctgtaattatcttttattttaataatgcctctgtctagttttggtgtcaagattatattgcctttagataatgagctggaaaaaaatcatctttttgatgtatgtagttctaaaccatttttttgttttaatattccattgtatgaatctgttttctgcactgacacattcaacacaattgccaagctgttacccccttttaaaatatgtgcacattttctgtctcttttattatataaaaacttgaactatttccacagtttggggaaggaaactatacacaggtctttctgtgtcattacctactcttctccaatggagaaagggtaagtttaacaaaataggttgcgcatacaaaacaggttgtgcatggatggtttataacacttcctttttctatgttctttgtgtttgggttaacctgtctgcaggatgaagatttgctcttcagaatacatttgctatgttctgaatgtgtcccctaaaattcatgtgttgagaccttaattcccagtgcaatggtgttgggaagtgaggcttaatggaaggcgtttcgttcatgagaattctactttcataccacttgtaaaaggacttacaggagtaggttcacccccttctgccttttgccatgtgaggacacagcaagaaatcttcaccagatgtcagcaccttgatcttagactccctgcccactacagaactgtgagcaactacatttctgttcttcataaattatccagtctcaagcattttgttatagcagtacaaataaagacaacgctgttaaggaaacgatactggaaccctcatacactgttagtaacattcaaaaatggtaccacttcttcgaaaaagtttggccactttttatgttaaacaagcaatctaactattaagcatttacccaaaagaaatgagaagttattcaaaatagtgaaaaacccagatgcctatcaactggtgcagataaacctattccagtttacttatacaatggaatactattcgtcaacaaaagaacaaactactgacatatacagcaacatgaatgaagttccattttattatgctaagtgtaaaaaggtagactcaaaatgttatgtgctgtatcattcttttaataacactatggaaaagacaaaattagacagagaactgatttgttctctgttctggggatggggagagaagggttgactaaaatggacagaaggagggatttttgggcggtggtggaacttatgaagtaaagcactaatcttctccaaagagaggtttggcccttgctctcaactcctgggagatgacctctaagcctctgaaatttcctgcttgggaagagtatctttgtttacctggttgccttgggccatgccagatatgctaacaatatgttttatgatgggggcccttaggccatgcggtatgaactccacctgtgcagactatggtcacccatgtggatagtcaatcacgtctatgtgattgaacccaagtaaaatatctggacaccaaggtttgggcaaacttcccttattggcattattctgcatattgtcgcaaattgtttctgaaagaaataggtgctgcctgcatgatttctctgaaagaagacaactgggagctctgtgcttggtgtccactggaccctaccctatgcagttcatccctctactgactttgttctgtagcctcctgctgtaatatactgtacctgtgggtataatgccttttctgagtcttgtgagtaaattattaaacctgagggtagtgtttaaactttgaagttggtgtcagaaatgagagtaatcatgggtatccccaaatttacagttggtattattataaaaagtgatattggggaacactgaacttgcagctggtgtcagaagtgaagatggtcttggggactcccaaattacaaaactgttttgcaccataatcatggtggtaacatgattctatttgtcaaaagtcatagaactgtagaccaaatcagtgagcattaccatatgtaaactagtaaacaaataaaaaatttaaagatacaaaacattgtgtatagtacggtgtagttagtaagttgaaggtgatttttacttttgtttaggataagcatataattttgtgataaaaataagagatcaccatttaaaattatggaaagttctcaaatctatactcaaattcatataagatttaggatatacatttagaagaaagttaaatcagaaatggcataattacaatctttataaggtatcagaaatgaggataaatatttgaaaaatagctaccattggtcaaataccaattataagccagtcattttgccaggcatttcagataccccatcttattacttcttcaaaacaaacttgacaagtagatatcatttttcttttcctaatggaaaagctgaaacttgtaagagtctgtgtaccttgccaaagttcacacagccaatgagtagcagaaatagattaaaaattaatcttactttcaaatagctcagtaggaaaaaaagtacagatacacacatacaaatatacattaagtatttataaaacagtgtaaataattgttgaatatgtaagtggtgggttactattctttcaactttcccatacgttgaaaattcatattgcacccaaacttctctcctgagtcctaactactaagctcatcagccatctcctagcactgacacccataatgcccccatatccccacacctcacatttgctcctgttcacaactccccagacaccttatttcacacagaccctaacacagactcttcaactcctcaaacccaaaatacagacagaagccccagatgaccaagccagcagcctatgctctcaaagaccattccctgaaagctagtgggtctcccaatgccaagatctggagccgccctgtcactgccccaggaaacaacccttacgtctgtcattccttttccacccacaaggtattcttgtaaacacaatgatgtctttaggacattcgccccagacactttagaagctgcctttaaccaaccccaatgaataccctcacgcatcacctgccacatccccaagtcacgaatccctacagtggcgcattccagcagttcacagaaactgaaactttgccttaacttctacagtgacctgctgccatgaaagtataaggcttcctacactgcacatccgcttccacccactggcctggctgtcctgcctctagggctattgcgcagactcagtagaaactggaacgaccaggagtcccagattctgatgtctaaagcctttagcttcctgctctttggaaagctcatttcaatcaagtctgcaggaggtagccatcttgaaagaagtgccaccagacagcgtgctggccattcttttgggctaatgggctgcctctgagaggaaagaaacaattgcaacccaccttttctgtccttttccaagacacgtcagcacgagcatttacacctgtccaaaagttgcaaggagtgtggctcatgctcaatagcatttccgtgatcccacctatctgtcatgaacctccagacagcgaaaaccaatcaccaggtcaaacctaaactgaagatgtctttttgccctgttgaaatcttgtccattttggaggaattttgaggtttatagagcaaagaatacattccctcaccgaggaagaagggaacagacagggcagattctaggtctacctctaacagaggtaagctagagaagtgaaactggctgagggaaagtgctcctggctttctctgtgtagagatcttgcccatagaaggtgataggtgggatgtttatgaggaatggataaataggacttctggaatgctccattgcttgatctgagtggtattacacagttgtccacatataggtgttcccatcacatgttaaaatgtcatgtgtgtgtaattgtgtttaatatacttttgtaatgatatgaatgttttaataattgtatatgccctgtctttacatggctagctgtcaggtagggtgaatggctctttaaaagacagttttcttttctttttttttttctttgagacagggtttcactcccattgcccaggctggagtgcagtggcacaatcttggctcactgcaacctccgcctctgccttcgggctcaagcaattctcccgcctcagcctccagagtagcagggatgacaggcacaggccgccccacccagctaatttttgtattttctgtaaagacaaggtttcaccatgttgcccagactggtctcgaactcctgagctcaaatgatctgcctgttttggcttcccaaagtgctgggattacaggcatgagccaggtgatgggccctgaccccaaagacagttttcttacttcctactccttactccctttctctaactcaacaccactgggtcttcagtggtcagctcagcaattacagatacttcttagaacccactatctcaaacttcccaatagggacaacaagttttggccagcctcaagtaaaaagtgagccaggagccagtaatctcatgcaaaaagggcactaccctaagatttaacattttttctctttctcttttacctgctggatcttgggtgaactgcgttgtattggtctttttacagatgcattagaggattttggtcaattggaccaatctagaggataacggctgttcagcttcaagaacaggtaactgtacgggagtctatgtagtagagcctggttctgaacctggccatatgatctttaaagataatgaaggctctgttgctaccttctatagtatccccagatttgtgagcttcttggcttccttgaaactttcattgaaaataagtttctctttttcagcttgctagtcttcagtgtgtaagcccccttctttcttaaataccacacccctaaaggattgacatcgtgaaggtgttgtgctttgtaggacaatacattattataagctccaagttgaggtatttgggagtgaagggttatgatgtctgctatttaccttcaaatagttcagtcgaaagaagcaaactggatagaagagcgagatagattataggtagaagataaagcaaatatggcaaaaattaacatttattgaatctatgtgatgtatgtaagggtctctgctatactattctttaagtttttctatatgtctgaaaatttttataataaaaaccttgagaaaaactaccagtgactgattctggattgtatgtaattgattctttggttgcttgttttctgtgtagcagaaaatccacgaataaagtagaggttctgtctatcatatatcattggcataaatatcctcagtgctcatctgataataaccattctgcacccatctgggaaggaccaggtttctgtttagtttaccaggatgaaagcctgtggagaaggtaatgaattgatgctatttggattttttttttttgagacaggatctcactcttgtcactgcagatggggtgcagtgccacgatcatggctcactgcagccttgacctcctgagctcaggcaatcctcctgcctctgcctcctgagtagctgggactacaggaatgcaccaccatgcccagctaaattttttttttttttttttttagagatggggtctcgctatgttgcccatgcttctcctgaactcctggactcaagcaatcctccaatctcagcttcccaaagtactgggtttacaagtgagagccactgtgcccagcctatttggaatttattgaccttctcagatggacggaataattttcatcaaatttgggaagctttggccattatttcttcaaatattctatctgttgcttatcccctctatttactttctgagactttcattacatatgtgttggtgtgctggaaagtataccatatgtttctaagagtctgttcactttatgtttttcactttttttctgtttcacttcttcatgttcctcagactggataatttccattgacctagcttcatatttgcttattctgtcttctgccacctcaaatctgctgctgagacctgttctctttgttgctacttcatagttctttatacatggtttacttcagttccttgaacatagttaacatagctgacttttaatctttgcatattaagtctgacatatgagcctcctcaggggtagtttcagttgacaacctcatttcctgaatatggactatacttttctgattgtgtgtcacaaatttttgttgaatatagaaattttagatcatataaagttgttactttggaaatcagattccctctctccccagggtttattgttgcgattgttgttgcagtttgttcagtggcattcctggagtaatttatgtattccctgcagtgtgcagtcacttgaagtcttttcttagttagctaatgattaatcaagatttccttcatttctctgagcaagttttccactctttgctgagggtgctgtgtgtgtgtgtgtgtgtgtgtgtgtgtgtgtgtgtgtgtctacttcaatgctcaagcagtttgtaagtctactttagccttctcttccttcttctcaagggcttcaagatcagctagaagtgaactactggtaccctcaggtatctcatgggcatgcacacatccctgtgtatgtgttgggccttctagatcctcaggaatatgtcagagtatttaagagttccctattaacatcttgttcttcagatgtccgtttaacaatttttcagagctcttgtttgctccctaacggtactgcaggcttaggctactacaaagttaaacaattgaagctgatcgtttttgaccagtgccctagtatcgcacttttccttcaaagtgagctttgagtcaggtgagagaatgagttaggacaaagaatggaaccacatcatggagctgtaagacaagatatataatgacattgctctgaggatgaggctttttgaggatttccaagcttatttgtctcctctgatacaagggtggtggttgaaggctgatggtcttcatggctactgtggttctgaggctgctgttttccaacggtaatgcagatctggggaaagggatatagaagtaggccaaattaaaattccacataccccactatttttaatgaggttcaaaatttttttcttgaaaagaaaatgctgttcaaaatattgtaagcctttggttattttccaaaattgactgtgatgatgtttatgttgttttaatgaaaggatggatacgcagaggccttgtctctgctattctggacatcatgccttatcacataatttattttttgcacagtaatctctgggataaaaatttattaactttacaagtaaataccctaagtcttctaatgattaaatggtttaccatgggttatacagttgatacacaaagccattactgtttatcaatatataatactgcaccaatttaataattgtgctaatgaactgttaaaaattcgaatatgtccccagattatttctacccaacctcacctccatgcttccatcaagtatctcaaagaaaaaatacagagaacatcaggataatgctaacagacagttttgtgtttatttggttgtatgcctgccttctgagtaaagagtaaagcctctacatcgctaagtcaatgtcatacaaatcctttaattatccgtattttgggtgtatgtctgtcatattctagacatccacatacccttgctttcttaagtgaataaccagattctctgaagaagagacactgttgtgaacaggaccatcagtaattttggattttttttcaccatttaagacgagaaacttggtgctcggggaccttgaacatcaagatcggggggctgagggagggataatatactgcatgaaaggtggtagtatattgcagccagaggcttgattggaaaagaacagcattatgaatgagcaggatagaactgataaagtaaaacgaaatgaaagtacttcctagaagcagcatgatttgaatggcttttgcctcaggggagaatctgtaggagctgctgagggtgtgaatgcgcctcactctaccatgtagacaccagctccaaccatgagtccatgaagacaacatctgggaaagtcaagagaaatgtgtattttgtgtaatctcagcactttgggaggccgaggcaggcggaacatgaggtcaagagatcgagactatcctggccaacatggtgaaaccccatctctactaaaaatacaaaaattatctgggtgtgatggcgcacgcctgtagtcccagctgttcaggaggctgaggcaggagaatcgcttgaacccgggaggcggaggctgcagtgaaccgatatcgtgccaccgcatttcagcctggcgacaaagcgagactccatcaaaaaagaaaagaaaggaaggaaaagaaaaggagaaaggagagaaagaaagagagaaagaaagaaggaaggaaagaaagaaagaaagaaagaaagaaagaaagaaagaaagaaagaaagaaagaaagaaagaaaagaaaaaacaaagaaaggaaggagaagaaatgtgtattttgcagtagatgtttcaggatttttagaagagcatagaccacaatttcatatcttggtagaattggggatatgccgaagggcctctacatgtttaagaacaaagatttttattgtaggttgaagaaccaatacagaaagcaggagaaaccgatgttcttcaaagctctgtctttgaacctcatccacccaccagccttcgggtgggtgattgcctgagaactgctcaagtggcaagtgactgtagctttcaggctgctcaccagaaatatacagatacatatatatctgtacacatacacacacacacacgcacacacacaaaactctaagaacctattatctcatgtgctgctttcaaatctaagattattattttaaaattttttgtagagatggagtctcgttacgttgcccaggctggtctcaaactcctgggctcaagggatcctccaaaggatccacctgtaatcccaaagtgctgggattacaggtgcgggccattgtgtctggcctgcttttagtctttgagctttacagggccctgaaggcctatctttgaattcccttactctcaccagatatgctcccactgcacaggaaaggctcccacccagctaactccccaatcagctgaactagctgcacccaacatggtcctcaatctatattcagcccatggaattatacaaagcaattgcattcttccacagaaaccatgggcacgttaccctctcattatataaagcctacttcccacaatctccgtgcttgttcactctattcctgagtgcaatacctatatgcaatgaccatttctctcaggctgtatctgtgactaataaactgctgtcaatttcatctagccagtgtcaggtgttgtgttcagccattccatactacttagggtagggagtccctccctcatgcaccagggtgaataggaggttgtcagaacatatgacacacacaaacacacacagaaaaatgttgcaatggtcaaatccagattagtgtttagtactccttaaacatctttatgtctgaagattttcataataaaatggtgaagaaaagatttcttgacaactgtcaaacaaaatggggaaggggcaaaaatctagagaaaaaaataagcaagattttgctggtacatttttacagaattccttgcaaaacaataggtttcactgataaccaaaataagtcagttatttcacatggaggtaaaaaaaaaccttgctttttaataactagaatacccactagaagttttatagaagattcagtcaagtaagtctcattttgttaaaaaaaagtccatatttgaagtgccagagttcatgcaatatttttctttttaaatatatttttcttcatgtaaaaattcaaatattaacaattttagagtgtacaattcagtgaagtttagcacattcacaatattatgcaaccaccatctctatctagttcaaaaacattttcatcattctaaaagaaaaccccatacatactacgcagatagattgcattctcccttcccctctagtgcccaataaccactaatttgctttatttctctatagatttacctattcagagtatttgatataaatgaaagtataaaatgtggaatttgcatttggcttctttcactcagtatgttttttggggctcattcatgcaacatgtcatcagtacttcattcatttgtataactgaccatttatgtattcatgtgtacatgcatgtagcacattttatttattcatcctttgataggcatttgagttttttcaaccaaatgctattttggctattgtgaacagtgctataaacattcatggacaaatatttggttgagtacctgttttcaattctcatgggtattttacttaggaatggaattcctgggtcatatggtaagtctggatttaactttttgaggaaccaccaaaggaatggcatattatcataacaaatcaaaagtttcggtgtgacacaaacttgaaatatatagccataaactcacctcatataacctcacacttttttcttccattactctaatgtgttgctggtttttaaatattttaggtaaatcttttataatctttggatgtttcagagttataaggctctagaaaaatgtaaacttctacttgtgatggatcatcacagtgggcaaaaatactacaaatgacagcaaaaataaggaattcacacttacgtggtataatcctttagactccttaataatgagtcaaatatgtattacaagacattttgattcataagaaaaaaacattttatttgcactacattgaattattcaacattttgtcttatgttgagaatttctttaaccctgaaaattgtttcttcgtgtaattccaagtaaacaatgaagtttataaatatataaagtacatgtcacatagtacagtccacaacacaacccctaagatcctttgtcactattcgactaatccttattatattcttatttttcatatattcaaaaggaatatttgacaatgaaatgtctaatatttatagaatattctctggaatcctttctataataattatgcaaaaccattataaaattatatatacaggcaagggtaattactcaaatctaaagtgccatcacacatttaaaaagccctgacaattactatgacattccagatcataagatgcttcacaatttaagacatggtaggatgtgaagaagtgaatccatgaaataaaaaataacttatcactgatgcttttaccactttcactgcattcataaaatctctgtatggagcaaattctgctcctatatttaaaagcttgtgatgtttaatgctatctaatcctccacagaaattatttcctgtgaccagaaccattgcttttaggtaaatgtatgactctgctgaagcagaatagatatggctccattaggattttatacctgcattgaacctaaatattattgccttcgagaataggatctttctgataactgagttagggggcaattcagctctgaattttaaataaagaattttagacaatcactgcaattctttcctgctatgcaatgggttttgtggccaatggccaagtttaactctatcgttttcccttctgatttaagtatctgatgtatatgtcactttcaaaagctttccacattccgtttcagaaggacctatctaccacatgagtttgctgatataattagtgacctttggtatctacatgaaggctttaccacatttactatattaataggggtttcctcttgtatgagtttgctataacaagaaagataaacattaactgggaagactttatcacaatcacattcactgtatctatgagatttctctcgtaaacaagatattcaaagagttttgactttcagattttaatttttacctgcaatgaggtgtgattcttcttagctttcctgcattccctccatctgtagggtccttctcctgaatgaataccctaatgtgtaacaaatataatttgagaatgatttatcattttcattacatccactggtgctgcctactaaatggaaagcttctagttttctaataaacttttttgacaatcactgcactcataattgactctctctttttttttttttttttttttttgagacagagtctcactctgtcacccaggctggagtacactggtgcaatctcggcttactgcaacctccacctcctaggttcaagagattctcctgcctcagcctcctgagtagttaggattacaggtgtgcacaccacacctggctatttgtttttttttttttttgtatttttagtagagacagggtttcatcatgttggccaggctggtctcgaactcccaacctcaagtgatctgcctgcttcagcctcccaaagtgctgagataacaggcatgggccaatgcgcctggccaatgattcttcttgtgagatctctacggtaaacgagggatatcttcaaaaaagaaggcttaaaatattcattgcatctataaggtttctctcccacaagagttccaaaagggcccattacaatcatagtattcatggaacttctattgtgtctgagctgatgtgactaatcaaaaaagctctctcatattccaagtcactgcatggactttcttccttcctgctggggtttctgatgattagtaatagctgatttctgagtaaagctttttgacattcactgcatctatagggcctctttcctgtgtgagttctctggtgaccaatgagagtttacaaagtagcgaatgctttcttacaatcactgcatttatatggtttctctcctgtatgaattctctaatgtacagtgagacaggatttaactatgatggctttattacacatgctacatttgaggagtttctcacctgtataggttctctgttatataatgagagttgacttacaggacaaaaccttcccacatccactgtatccataagatttcattcttgcatggcaagtttttcgatgcttactgagacctgtcttttgggtgaaagcttgttgaccttcattgcatcatagggtctctctcctgtgtgaattggctgatgagtcatgagatataccttactggagaaggccctatcacagtctgagcattcatatgatttatttcctatatgagttctctgatatacaatgagatttccctttgatgtgaaggctttatcacatacattgcatttgaagggtttctcacctgtatgggttctctgatgtataacaaagttttttttggaggataaaaccttcccacattcactgcattcatgggatttccttactgcatgatgagttttcttatgattgttgagatccaacttccagatgaaagcttcttgacattcactgcatccatagggtctttcttctgtatgaattcactgatgcttcataagctgagcctttttcaagaaggctttctcataatccaagcaagcatatggtttctctcctgtgtgagttctctgatgtatagttagctgtgttctaaccatgaaggctttatgatagactttgcacctgaaaggtctctctcctgaatgagttctgagatgcaaaatgaggttcgacttccaaggaaaagctttcccacatttactgcatccatagaattttccttttctatgaagaactttctgaggataactgagctcagatctggtcttcaaagctgtttgacattgaatgcattaatagggtatctctcctgtgtgaattcactgatgaatcatgaataaagccttttttgagaaggctttttcacaatctgagcaagcatatggtttctctcctgtgtgagctctctgatgtacagtgagatgtgtcctaaccacaaagcctttatcacatactttgcaaatgaacggtctctctcctgaatgatttctttgacataaaatgagttctgacttccaagggaaaacttctccacatttgctgcatgtacagactttcccttctctatgatgagttttctgatgatacacaagccctgaatttgtaatgaaggctttttgacattgattgcatcagtagggtctcactcctgtttgagtttgctgatgagcaatgagctttaactcactgggaagggctctcctaaaatcatgagattcctgggatttgtttcctgcatgagttctctgaggcatggtcatgagtagtttacaagtattcactgcacattcactgcatccatatgatttctttccaaaaagaattggttataattagcaagctctgacttctggatgttatgaaagctagtgtacgcacaacagagtaagtgagataacaagaagaggtccagaaaaaggcttcttttcccatttaccataaaaagatattagtaagatggttaaatttgagtaagctctgtattttaaataataatactatatcaatgtcaatattctgattttgatcacagtattctgattatgcaaaagaatgctcttcttcctatgaaatacacacttgggttttagggtagagttcagaaaaaccatatgtacctgtgtgtggtgtgtgtgtatagataaaataaagcaaattggtaaaatcatattttggggaaatttgcaaaaagaatgtgcaagaattttgtgtatcattttggaacatctcattaaatctagaccatttggagacaagcattttcaaaaggagaaaataaaaataaagatattgatgaaaacatacatagggacactaagtataatggcctgaatgtaaaagagataaacagtgtaatattcacccaatgccattctgcacaggactcagattcttgatctaggtgctggttgcacagtgtgctgactagaaagttacctagctgtataattacattatatgtatgttataccaaaacatttttcattaataagtaaacaaaaacgtttaggccgaaatcagggaatgctcccttgtaggaggatcctgaaaagaatttggatcttgtgctaacagtaacaggatgccattaccaatgatagtgggagcaggatgacatgtcctgatttccaatttaaaagcaacatcctgtgtgtatgtttatcagtaattaacactgaccatgtcttaaatattatggcatgaatatttttaggcttgcaccctgtgaatgagtacagatttgctacatcatatagcattttttagaccataatttagatctttccatcctccaactaagatttacctttttatatgaagctttaattactttccgcaacacttttgtcaaaatctgaagtcttttaagaaccaagatgtttctgatgtttattttaatgttcagggattttggaggtgaggggctagaaacactgactcctgcccctgactcccgcccctgactcccgcatttattttcataaatgaaaatagtaaaataaattcattaagggtattatgtggagaatagaaacaagagtaaaggactgagagtatattagagaaaactatcataattttggcaagagataatggacatcgaagcttgagtgaaaataactgttagagaaaggagtagaggacctcgagatataaggagaaagtaaagtctaaacttgctaaatggactggatttgtgggatgagtgaaacggtgaagcaaggatgacttgaagtttgagttagctattagatctccaagcaattcccaggcaaatgtaggaggataaggaaatatctagcctgtagagagaaatctgtgagtcatcaacatataaatagcattgttaagtccatgaaatcgaagaggtcacactgggaacaaagaaaagaaattaccaatgatgaagcacccttacgccctccaactctgaaggctttgggagaaggagatgcccagagaatggaaaaagtccatccatcacgctcaaacaataagtacccagaaaagaggccaacttaagtcttaggaaccaacatctgtgggaagcaagataaaatgaagtcttctcagctcttcacataaatgtaagtgctgtcactctgtttcagattcattcttctttaattctgcatgcaacagtcaatgaactttcccaaagattttttttttcttgagacggagtttcgctcttgtcacccaggctggagtgcaatggcgcaatctcagctcactgcaaccttcgcctctagggttcaagtgattctccaaccgcacctctggagtagctgggattacagggcactcgccaccatgcccagctaatttttgtatttttagtagagacagggtttcgccatgttggccaggctggtcttgaacttctgacctcaggtgatccacccacctcggcctcccaaagtgctgggattacacacgtgagccaccatgcccgcgccttcccaaagatttctaacaccatatatacaggaacaccactgtggtgagcactcccaccttctaggttgctttgatacattctcatatgattcactcaggtctgtaggaaatacaaaaatcaggccaaatatccttaccccaggataaaaggcagtgctgtgatgatgtgtcgattgtgagaatctaagtcaatataaagagagaaaaaggcacattttctttgaaacgccaaacaaaagagagcctcatcaatgatctaggtatctgtagtcaccttccaagtctttgccctgttaaacacatttggaaggggtccaaccctcatggtcagctcctttactttccaggtctcccatcttgttggttctcactcacctgaaatgcactgacctcacattttatcctctattctccatgtttgaaattaaatatcactggctgggtgcggtggctcacacttgtaatcccagcactttgggaggctgaggcgggcagatcatgaggtcaggagattgggaccatcctgaccaacatggtaaaaccccagctctactaaaaatacaaaacttagctgggtgtggtggcacacgcatgtaatcccagctactcagaaggctgaggcaggagaattgcttgaactcgggaggcagagattgcagtgagctgagatggcgccactgcactccagcctggcgacagagcaagactccatctaaaaaaaaaaaaaaattaaagatatctggtttggtagcttaagagcctgtttatgggaaatgacaaagacttgaacacttataattgggcttgatgggaggtgtctatgaacagcacagaaatgtttctggaactgacacactttcagctcggcagattcaacatctactatgacagaggctgcagtgagccaagattgcaccactgcactccaacctgggtgacagagcaagacctgtctcaaataaaaattaaaaataaaaaaaagtaaaataaatacataaggaaccacccccagctgacagccagcaaagaaacaaatctcagaattagtctgccaataccctggataagcttggaagtggattcttcccagattcttccaataagagccctgttggcccacaccttgacttcagtctttgaaacccagatcaaagaaaccagtcaagccaatccagacttctgacctaaagaactgtgagacaataaatttgtgttgtttcaagctgctaaacgtttgtgagaatctgttttggcatcaacagaaaattaatacattattgacaccagaaacatcagaaacaggccagttgtggtggctcatgcctataattccagcactttgggaggctgagatgggcaaatcacctgaggtcaggagtttgagaccaacctggccaaaatggtgaaatcccatctctactaaaaatacaaaaattagccaggcgtggtgacacacaccttaatcccagctactcaggaggctggggcaagagaatcactggaacccaagaggcagaggttgcagtgagccatgatcgtgccactgaacctgtgtgacagagtgagataagaagaaagaaagagagagagagagaaaaggaagaaggaaagaaagaagaaagaaaagaaagaatcagaaacaacttaagtacatcatacattcttacatatttattcacctgtattcacacttaaggcactctgtatgaagctacatttcctcattccacctttacctgaatcttgattttatggtttctgtttagttttccttaaatttttaaattacaaatgtatgtatttccatttaatagttatttgtcttaagccttgcaaagtcattggaaagaaaggcaaaagaaagaagcaaaacctcaccggggcttttatcgtttttttcttcggttcttaggaaaaggatatcatttctaaggtatgatctagatattgtcttttctgattctgaacatcggacaaaagatctcttttcaagagaaaagaagacatgtcagagagaggcccagcttttagaattgtgacaattactcaatttccctcccttaatgaaggacaactttttaaaaacacaaagctggccaggcgcggtggctcacacctgtaatcccagcactttgggaggctgaggtgggcggatcacaaggtcaggagttcgagaccagactggccaacatgatgaaaccccgtctctactaaaaatacaaaaaaaaaaaaaaaaattagccgggtgtggtggcaggcacctgtaatcccagctactcaggaagctgaggcaggacaatcacttgaaaccggaaggtggaggttgcagtgacccacgattacgccactgcactccagcctgggcaaaagagcgaaactccatctcaaataaacaaaaaacaaaaacaagcaaacaaacaaaaagaacaaagctagggttggaaaaagccctcagaggtcagactaatcagcaccaatgaggaatttctagtcctctacccccacccctaaatacagatacagaaaaaggcaatgagaacctggaatgtcttctcccttgcatgggatcagagccaggcaagttctggtgggagagctgacactggatttctactctgaggtctggcaggttctagtatttacagacccaagttctaaactgggaatcaagacaaagtggatggaatctgtaaatctgtgcaccagcagttgtaggtttttaagtgtgtcaaatttctttatacataaatcatcttcccacttgtaatagaagttctttttaaaagttgctgacttagtcctcaaagcactgcattgtagacactgttctagaagctttctgttaacagtgatgcagttgttaataggccagttccggacactccataggacacagacacctacacacctaaaaaagtttcatctggggtgtaaaaggagaaagtcagcagagtaaggttaggtaagacccatgccctgagtcccctccccagcctccaacatgggatccatctggcccatgagagcaggaagaacaagggcaaacatgtcccacacaacaatgggattctgtaggactgcttcccacctcagccacacagcagggcagactcaccaagaaccgactgggtctgacccaccaaagactgccccagccaaagcagaactgccagatgagctcagaattaatatgcccaaggccaattccctcataatgttgcctacagaagccccagcaagcaccggctaaggttctgactactaccgtcttcaactgccttgaacacccagatagaattcactcatgtgtgtgggggaaagaaagatagatcagactgctactgtgtctatgtagaaaaaggaagacataagaaactctattttgatctgtactaagagaaattattctgccttgagatgctgttaatctgtaaccctagcctcaaccctgtgctcgcagaaacatgtgctgtgttgactcaaggtttactagatttagggctgtgcaggatgtgctttgttaaaatgtgtttgcaggcagtatgcttggtaaaagtcatcaccattctccagtctcgagtacccagggacacaatgcactgcggaaggccgcagggacctctgcccaagaaagcctgggtatcgtccaaggtttctccccactgagacagcctgagatatggcctcgtgggaagggaaagacctgaccgtccccaagcccgatacccataaagggtctgtgctgaggaggattagtgaaagaggaaggcctctttgcagttgagataagaggaaggcatctgtctcttgctcgtccctgggaatggaatgtcttggtgtgaaacccaatcgtacattctatttgctgagataggagaaaaccaccttatggctggatgtgagacatgctggcagcgatactgttctttactgcactgagatatttgtgtaaagtcaaacataaatctggcctatgtgcacatcgaggcacagcacctttccttaaacttatttatgacacagagtccttcgctcatgtttcctgctgaccctctccccaccattaccctatagtcctgccacatccccctctccgagatggtagagatagtgatcaacaaatgctgagggaactcagagaccagtgccggtgcgggtcctccatatgctgagcaccggtcccctggggccactgttctttctctactttgtctctgtgtcttatttcttatttcttttctcagtctctcgtcccccctgacgagaaacacccacaggtgtggacgggctggaccccttcaatgtggagaaaaatggccaaaggcagatgtgtgccagaaacccctacaggggctaaacagtcaagacacaccagccgctaactagaataagttgttaggcctcctaactgtacttcccataaacctcaactgcccagcacaggtgtctcaagcactgcccatggccaaactacacttcctaggaagctcagcagccctgttcaaaagcctcagttcccagagaaggcaaagaggggctaaacaccgggtagactacactgcacaaattcagctgagcttgcttctccctctcagggaacctggtgctgattgctggtaattgcctccttctggtccctccctgggaggattaacatcctaggggcattgggtccagtgcgtagactgagcttcatctgccccttgttcaggtggggggaacccatcagtaaattatagtttttataatccacttgattcatatgggacatttatagcagctatttctaacatccttttctgctataagtgtgccacttctgggtctctactgagttttcttcatgttatggggttatattttcctgcttctttgcacacctgggtaagtttgtattggatgccagacatggtcaattactgactggtagattgctttctatttctttattagtctctgtttggaaaattgctaacttacttggaaagtatggccttttcatggcttgcatgtatgctttgtgaggagagttcgaggcagcctttactgtagagcaaatctgagccacccacagaggcaatactccttacttaaggtccactgtgattctccaaatgttaggaggcgtttccactccagctggtggaaatgcttgtgtgtaatccaaggatttttctgcgtgttcatttcttcctgttcttcctccagcctagggggggtttctcacatacatatgctgattatgactcaaaaggcttgtgggggaaactctacagaactctcaattcttgagtgcagctcttctccaataatccaattcatgaatttgggccaccttgaattcctcaaaccctaaactctgtctcaattcagagagatggctgggatctgcttgggtttctcctcccaatcctgcagactggaaactttctccaggcactaagctggggcaatcataaggctcatctcattgtttcctttctgtcatggaaagctgtcctaagccctttacttctcaatgtctgatgaagttcattcatatattttgtgcatcttttttagatatttaaggcaggagattatatacattagacatttactgtaaaagaaaaagggactgtttgggttggctatgaaaaagttagtcaatatccaggtgcattatgtcatatgcattccgtactcataatgaagtatgttagtttcttttccccccttttttagagtcagagtcttattctgtcacccacgctgtagtgcagtggcatgatcatagctcactgcagtcactgcagcctagaactcctggactcaagcaatcatcttgcctcagcctcccaagtagctgggactataggcacacaccaccatgtccagctattattatttttttttttttttgtagaggtagtctcgctatgttgcccagggtggtctcaaacttgcgggctcaagtgatcttcctgccttggcctcccaaagtgctgagattacaggtgtgagccactgtgcctggccaggtaggttaatttatataatttcagaatagatacaaatttacgtttagcaacatttcaagcaccataaatctcatgttctttttggacatttaggagttattttccagtgctgatgtgattttaacatttcaagagcatctataatgctcacatataacaatcatagcataagattctctgattatagaataaaatcttaacatacttgcctcataataagatagggagattatcctggcttatctgggttttcacagtgtaatcacaagggtcctcaaacatggaagagggagacagaacactcaagtgtttgagtgatgtaagactgattggccattgctggttttgaaaggaggccccaaaccacagaatttgggcagcttctagaagctggaagggcaaagaaagacgctcccctagagcctccaaaaagaaaagcagccctgtcaacagcttgatgtagccccgtgagatgcatttggacttcagtcctccagaactgtaagataatgattttgtgttgttttaagccattaaatttgtgttagtttggtgcaacactcataaaaaactaacacaattttacttccatatttgttatattcataggttttcattacataatactattcctggggttcaagatttcattaaacacgtccctccaagactctcaagacataaaagtatgatacatgagttaatttggtgagttgccatcatttcttactttcaagagtttttcttttctacaaattctcccatattttacgaaaaatgttttccatatccattgcctctacagttgtctatgtttctttggcacacgaggcacaatttagcgctaaaagcaccatcacaatctttcataaatattcctgtaagaattcttttgataccaattgagatatcatctccaggtaaagacttcctcataacagctgcatttctacccaacatgatttcaatggtgtttaacaggtttgacttctcacagaaatgtcctccacaaccactgcctccacagtgtttcagccctaaatgagctctctgggatataatggctggaggattcctactaaagattttcccacctttctggtatcagaagatttattctgatacaatatctgtaagatacaagatataatttattactgatggggccacattcacttcatttgtgaggcttattctctgttcaaattcctgattaactacaaaggcttgatttcttggaaaaggttgttccacaatcactacatttctgcccactaggcgctcactcttgtttaacaatggcggggttcctgaggaaggcatttctataggtactgtgttcacagtcttttgctcttgtatgagttcgctcatgtataaggaggtatgactccttgaggaaggtttctccaccgtcagtgaatttatggctgtctctcttatgtgagttttctcatgtttaatgaggactgacatgtgggcaaaggctttgccacattctctgcatgaatatggtctctctccagtgtgagtacgctgatgctgaatgagcttcgacttgcttctaaaggctttttcacactcactacattcataaggtttctctcccgtatgaatcctctgatgtctggtcaggtctgacttaaaatagaaggttcttccacaatcactgcatttataaggcttatctcctgtgtgaagtctctggtgtgcagtgaggtatgccttctgagaaaaggctttcccacacacactgcacccatagagtttctctccagtatgtgatcgctgatgtctattgagccggcacttccggctgaaggcttttccgcatttgctgcatctgtagggtttctctcctgtatgggttctctgatggaccatgagctgtgactttctggagaaggcttttccacattcactacattcatggggcttctctcctgtgtgagttctctgatgctcagtgagctgaatcttcctcatgaatgttttcccacattcaccacatccatggggtttctctcctctttcagttctctgatgttgaataagctgtgctttcctggagaaggctctcccgcacacactgcattcatgtggtttccctcctgcacaaattttttgtaggtcattgagctgtgatttagggctgctgggtttaacacatctatggtatttaactccagtaagagttttgtcacgcttgatatggaggcatgatctcccatatccaccaaatgcatcagaatcttttcctgcatatcttctactctggattacaaaacctaaatgagatttcaaacttttacaatgcgagccaaacttattgtgtctttacattaaaggaacaatgctcttacataaaccaaacttatttccaagggcataactttgttgacatctttcaaaatgtttaagctcattttggttttctgggtaccactgcatatggtaaaccccccaaatttctcctaggaaaaagcacaatatgaacatccatgataattttttgtggaggtggcagaaggtgcaaaaatgccatggttttggctggcttttataagatctcagtctcagagtaatgtacctcacactctgtgaaaaaggatgatactataaaacagcaaaaggaaaatacagcaacttcagcaacaacaatggatactctataatgaatcaatacaacttgggctgcctcccaaatcggaccttgcaaatggagacagaatagaaacagaaacacattgcaactggaataaatcaaaaatagatggaggggatggatgtattcacccaacaaacactgaatagactggtatttgggatactacagtgactaatcattattctctctctccatgaacctgtcattcaggtaaagacagagaatcaacaggtatgcaaagacgtaagaaaattacagaatgtgaagaacagtacaaaggaagtggctcacatcatagggtaagaaaaagcaatgttatgcaaagaacaaaataaagaacattccaagaaaagggaacagccagtgtgaaaacccagaggcagaaaaaacttaggtgtgataaaaaaaaaaaaatgtaagagaagctggtttacccggaatatcctgagcttgagtgaagtagaaatacaaaagtttggcaaggctggcaggattaaaaacatgaagattttggaggaagactttgttagaaactggaatttatgctaagaacaatggcagtaagccaccaaacatttttttgccaagaaaacatgttctgaattgacagttccaaaacatgactgtcctatggagaatgaattgaaaagatgaaattatagaagggaatatgctggaggttatggcagaattcagatggcttgatcaggaataattacaatggagatggagaaatgtgaaaaaacaagaacataagtatggaggaggaaaagataggattcactcttagaacacatgttcccagcagaaaagcgaagaattgaggataactgctcagtatgtggcttaaaacacctatgtaggtgctggtgccatttaataaaatgagggtaaaagaagcctcataccaaccagtaaaacacacacacaaaacaatatatgaccattactaagttagtgcagcatagacacaaaggagataaaagtcagaaaagagggtggccaggcgcagtgcttcacgtctgtagtcccagcactttgggaggtcgaggtggatgggaggagttcaagaccagtctggccaacatgctgaaaccctgtctctactaaaaatacaaaaaaaaggattagctaggcgtggtggcaggtgcctgtaatctcacctactcgggaggctgaggcaggagaatcccttgaacctgggtggcagaggttgcagtgagccaagattgggccactgcactccaacctgggcaacaaaagcaaaactctgtcacaaaaaaaaaaaaaaaaaaaaagagagagctccaaatgtgccctggcatagtcaaaaactagttcttggaagtaaaacaagagccgacagcgaaagagggcagtatctggatgtaaaaatgcaacgtgatcaaatgcacagatgtcagtcctcatgttatttgacattatctgtagcattcaataaaatatatgtcttcctcctccttggaataattttgtcacttatttcatggacatcttctgactctcccaccacaaccctgatactttttctatgtggctgggttctcctcttttgaatctctgaatatatgtggacctcttctttcttcaagcaacactcactcctcatgtcttctcatcaagttccagtgctttgatggcccctgcccagaggggaatgaagccatcacatcaaatggaactcacagaaaaagagaagtcagtcaaacgtgcagcaatggaggcgataagaacctctactaccatggcctactgtgaagtgggacttcaagagtagagtgttcaaaacaataaaaattaacaggagcagctgagacattcagacgtagaacagagtaaaccgagaagactcaaggcaactccaaggtgaccaggcaccggagtgatgagcaatacagcagaacctaaatataatgcacagggagggaaaggattttccaggaggaaagagaatcacagtttctaaccctgaagctgagggaagaagaatttcacagaatactcgtccagggtgctggcaaaatatagaataagaaggcaggtgagattacagaaaaggagatatctgcatgaagctatttgtcagaagacacagctgaaatctttagtatatgtgagtatactacatgatggtagaaacaactgggagaaaggaggattctggtttcacatcctggaagaaggaaatattcggagagctgtcctggtggctggcgacacgcagcgggttagagtgcagatgagacgttagtagcagacatgctactttgcgagtctccagcaggggccagagagctcaggccctgagagtgaattaaacttctaccaggagaatcagcagaagataaaaaaaaaaaacagaagctggaaaggcggggagcagtgggtgagtaagtcgacagagatgccccaagagacatggtgtggaggcattgacgtgagctaaggtgaggtgattttcagtgaaggaaatcaggcctttccagaggggccgggatacacttttaagcgacagaagtgctaaaagtaatgcaatccagccaggcgcagtggctcatgcctgaaatcccagcactttgggaggccaaggtgggtggttcatgaggtcaggagtttgagaccagcctggccaatgtagtgaaaactcgtctctacaaaaaatacaaaaaaattagccgggcctggtggccggcacctgtaatcccagctactcgggaggctgaggcaggagaatcacttaaacctgggaggtggaggttgcagtgagccaagatcacatcactgcactccagcccagccacagtgcgagactccgtctcaaaaaaaaaaaaaaaaaggcaacataatccagatgggttacgaggggaatttcaaagcaagtaaggaaggggcaaaagtcaggagcaggctgggaagaatggaaccaggtaagaattcaaggtcttcgatgacatggactgaaatcagatccagaaaatagaagaaaggaagacattatcctttgagagccggctctattagggatggacacagatgcagaaaggctgattaggtttctgggccaccaactactgtgaagtcctctaaagaacactttaaaagcatcaacccttctccgaccagctgggatttgcatgccatttctccccattttcttagttttcactcacttacctggacagatttgactgtgggctgctccttctgctatccctgggggttctccttgctccaacttgaagagcgaatctggcttggtgcctcgataccctgtaaatgggagatcactgaacacttggcacgtgtgcttggggaatggatgaagatggagagggttatgtctcaggaaccacagcatttgcactttgataaagcaaaactctttcactcaggaaaagagcacaaccacttcgtgccagggaggaaaataacagtctgcgtgacacacccatacccattaggatggctactatcaaaaaaacaaacagacaaacaaaaacagaaaataacaattgttggcaaagatgtggagaaactgggaccctgtgtactcttggtgggaatgtaaaatggtactgacattgtggaaaactgttcctcaaaaaattaacaatggaatgaccatatcacccagcaattccacttctgggtatataccccaaagaatggaaagcagggtctcaaagagattatttgtacacccatattcatagcaacatgattcacaagcgctaaaacatggaagcaacccagtgttccttaacagataagtggataagcaaaaggtggtatatatatatacaaaagaatattattcagccttaaaaaggaaactctggcacatgctacaacatggataaaccttgagaacatcataataagtgaaataagccagacacaaaaagacagacactatataattccacttatacgaggtacttagagaagtcaaaatcctaaagacagaaagtgaatggtggtcaccaggagctggggagaagtgggggaatgagtagttgttgttttgtgggtacagagtttcagttttagaagacagaaggtagtgttggtggctgcataacactatgtgcgcgaatgcatttaacccactgaactgcacgcttatggttaagacggtaaattttatgttatatattttaccaccacaacaaaaaatctataacatataatactttagtctaaaccattaaatatttatgggaccgtacagtggtcaccaaataagaaagaaaaggtaagtgacggcaatgctgtccttacctattgatactaggttgatgtagttctccaacattacttccttgtacaagaccttctgagactggtccaaaaactgccactcctccctggtgaagcccacagccacatcttcgaatgacaatgacccctataataacaattccaatgcaatctgaggtggataacaatagatgatgcggagaagagggacggggacatgtcttgatccttttctccatgacaacgtatgcacaccatggctatttcacataccaaaggaccatggaattccaccaattctgcctaccctaaaagcacgaaggcagtactagcatagatatgaaacaacatgtaataagactgttcattattcctttgtttctcataatgaaaaacttaccaataatctaaatgtctatcaaaagcagacagggttaaattacagcacctccatgctataatatactgcaaaaatgttaaaatcaatgaggtagatgtatacatacccacatgattatcaatgatctccaaggcagtctcttaaatgcaaaaaattaagctcccaaataatatatgatctaagacatattttaaaaatgtaataatacggctgggcgtggtggctcacacctgtaatctcagtactttgggaggccgaggtgggcagatcacaaagtcgggagattaagactatcctggctaacacagtgaaaccccatctccactaaaaatacaaaaaattagctgggcatggtggtgggcacctgtagtcccagcgacttgggaggctaaggcaggagaatggcatgaacccgggaggcagagcttgcagggagccaagattgcgccactgcactgcagcctgggcgacagagcaagactccgtctcaagaggaaaaaaaaaaaaaaagtaataatatggctgggcatggtggctcacgcctgtaatcccagcactttgggaggctgaggcagggggctcatgaggtcaggagttcgagaccagcctggccaacatggtgaaacccccatctctactaaaaatacaaaaattagcagggtgtggtggcacgcacctgtaatcccagttactcaggaggctgaggcaggagaattgcttgagcccaggaggcagaggttgcagtgagccaagattgcgccactgcactccagctctgggcgacacagcaagactccaacttggggggagaaaaaaagtaataatatttataattacatatgtataagtatacacaagtatgtatacataaatgtacataaatatgaatatattctaccagatgtcaatcacagggaggaactagatagagacccaaactatgaacacttatttagtatcctttgggttgaagtttgggcagaaaaagggtgaaaggagatactgtcttttgatacaaatgcttctgtttgcttgaatctcttgcgtgcaaatgtagccatgtatcatttcagtaattaaacatagaaaaagcaaaacaagccgaactggtgctttgttttttgaacctggagttaagaaggtaagaaagaagcattgtcagtatctgcattccaagctgttaccaaagaatggagctgttaattgtctcctgctgtctcaataacaaaaatctggatgagagaattcttcttcagggaggatcattcaaaggtcaagcagcccattcattctactggatactccaggctttatcactgggcaaagtcagatgaccagaagcctctattttcaaggcacgctattttcgaagaattttgtccaatccagttttcctttggcattactccttagcttaccccactaaacaacaggaaaaagccatagaaaacatcccatgcctttattacaaggctgactttgaggataccgtcaaccacaaaagctctctgaaggaaagaagtttctcaagctctcacagcaatgacaaatttacctcccctgaagaactgccttgctctctcctcacagacattacaatcgtggcatttttcatgtgtttcctgttatttcagctgccaaaaaaaaggagacacagtttaaagcagagaaaacccacagggtcttaacagtcacttagctatgttccgacattaagaactttcacaaaccccctgatccatatatcttgtttcttaatttgccaggattttaagattccaacttaaacttattttcccacagatcctgatttttatcagcatacactatctcatttaaccagactgtcttttacaagcttccacagacccattgggaaacaaacgacaaaataggtaaaacaaacctcacctgggccttgcccatttcgttcaactcttaggggctagcaactctagtatgttctctctcttctgtctattctgggccttcccagaagtggtggtcaggtatcatctcaggtcaagctaccactggaaatgatgatcttccccagcctggaagctccttcttccattactgaaaatgtcttgttcctataggccagaacctgtggattcaagaccaaattcaatgataagaagacatgctcctaggatcacaagtctccaattgccatctggactcacattaacatcaggttccaatatttcatctgtctccttaacaccctggaagccattacatcatggggcagtgatccagaggaagatatggaatgtgcaagaggaatgcctttttttttggttatgtcagaaatagagtggatgtgaaacaggagaaagtaaacaaaaaccacctatggtcttgtccactgccaagttctcacatatatcagttttaggtaagacaatgaaggaagtggtaaagccagacatggtggcatgtgccctagagttccagctattgtagaggctgagatgggtggatctcacctgagctccagagttcaagaccagcctggacacatggcaagactctgtctctaagaataaaaacataaaagaagtggtggctcaagaaactgacttaaaatcaccaccggcagccacatgctcctaaatttttggtttattgcactgtcttactaatcatacaaaccataagcactgtcttactaaaccctcgatactactttataaggtactcattattatttccatcctaaacatgagtaagctgaggcttgctgagacaacgtgtgttgtgcaggttaacattcttcctcattagtagcatgggaacttgaatctacatctggggtctctcccttgtgatacttccctcctacaacagccttacagtgcaaatttgttctctttcctacccacttttagaactttacttcccagcactttacactgcggggtggccacatagtcacagctacacaaacaagggcctgtgatctcctaatgcaatattcagtgtggatgctcagcctgctccttccacacagacaggaaagcaaaggcggtcccatctttgccccagaagcagcagttcagagatcagtctccccaagaaccactctagaaactcacactctgagaacacccacactgtgagaacaacttgaattttgctgtcatcccagcaagtcattctcaagactctctagcaagcctgtatcctttacacccagagagctgatctccaagccattttctgacccactggtaaacgcactggtcaagatgcaaacctcctctaccttcaatcctgagaccgcttcatcccagccccagcccttcagtctagcctccctacaggaccagtccaaaaacagtggtacccaacccaaatgcagaaatccatatggatagctaagaggtagaaaaggccattacgcatgaatgggttggagctgagatctccagggttgaaaaatccaggatccaaccattcccagaagctcatggcaggctttccctcatacataatacatcagaattgcaccaaatactcacgcggagaacatggcaatgtaaccgagaagggcaatgataccaccctgactggtaaggataatctggatttcctactgaactgaggttcaggtcaaatgtccagaggacactacctaaattaaagaggaattttcttaagaaagggggcttggttgtcagattggcagccaacagtatccaataaaaaaaaaaaaaaaactagggtctgctgtgttggctcaggcctgtaattgcagcaattctggaggtgaaggcaggagaattccttgaggccaggagttcaaaaccagcctgggcaacataccaagaccttgtctctacaaaaaaaaattaaaaatttgccaggcatggtggtgcatgcatgtagtcccaggtacttaggacggtgaggcaggaggatcgcttgagcccaggagttccaggctgaattgagtttatgaccgcatcactgcaccccaacctgggcaacacagcaagatcctgtctcaaaaaaaacaaaaggcaaaaaaaaggcttccacttcaaataaaagttaggatgcttccaaaccattacaagccctcagccttatctgcttttgggaggaatgaagcagggaggaaggaaacaggtgatttctcccatatgatgtcctacctttggatatggctgactgctgtatcagggtatcattttgtgtgggctttttaaaaaaaatttttttttttttttttttgagaaggagtctcaatctgtcgccaggctagagtgcagtagcgcgatctcagctcactgcaacctccacctcccgggttcaagcaattctctgcctcagcctcctgagtagttgggattacaggtgcccaccaccacgcccggctaatttttgtatttgtagtaaagacgaggcttcaccatctttgccaggctggtcttgaactcctgaccttgtgatccacctgcctcagcctcccaaagtgctgggattacaggtgtgagctactgtgcctggccaaattttttttttttatagagacaaggtctcgctatgttggccaggttggtcttgaactcttggcctcaagcaatcctcccacctcagcctcccaaagtgctaggattacaggcatgagcgactgctcccagcctcatggtatagtttaacttgttgttctctacctacccaactcccagtttttccttttaattaagtgagtagttcaacttagaggtttgattagtcccatgttcaatttttttaggtaagaatccttcatggatggtgctgtgtacttcctactgcaacatatgaagaggcatgagggcaaaaaaaacaaagaaaaaaaaagggggagctgttatagaattaaagagatctaagagatacaacaagcaaatcgaatgcacccacatcatttggatcatgattcaaacaatccaatgttaaaagacaatgatgagatgatcagaaaaaaactgaatgtggactaactattcaatgaactaaagaaataggctgggcacagtggctcacacctgtaaccccagtactttgggaggccgacatgggcagatcacttgaggtcaagagttcaagaccagcctggccaacaggaagaaaccccatctctacaaaaaaatacaaaaattagcctggtgtggtggcagatgcctgtaagcccagctactcgggaggctgaggcaggagaactgcttcaacctgggaagtgggaattgcagtgagccaagataacgccactgcagtccggcctcggtgacagagtgagagtccactcacccaaaaagataaggaaagaaattattattaacttggatacactgaaaatggtctaggatgggtgaagtggctcacacccgtaatcctagcactttgggaagccgaggcagaaggactgcttgagcccaggagttcaagaccagcctgggcaacatagcaagatcctgtctgtaaaagaaaaaacaaaaaggaaatggtctagtggttataaatttttttaatgaccttactggttagagattcatactgggatacgtacaagtttcaaggcatgaagccttggatttgctatgaaagtctccagactaaaacaaaagtggaggcacagataaatatgactgatatgacagatgaatatgaattgataaccattgaagctaagttatgggtaaatattatactcaatttccatgaaaaaaagttagagtcatcagagcctgatgagttctatctaatctttacagtacagagatgactccaatattatgtaacattcatcaatcacagaaaaagtgaagcctctctaacaattatataaaaccagcatttccaaacacaaatcaatagaataaaaaaaaaaagaattatagagataggtgcttttccattgattttcatccttccttcttttctaatacttgcattcaaggttataaatttcctccactgactgcttaggttaaattcaacaagggtttacatgtagaattcttattaaaatgcaattgaaaatatttccactgtgattttttgaactcagattatttagaagcgtatggcataattaacaatcattctgacaagaaaacagcatgttctgaattgatagttccaaaaagtcacatgactattctatggtgaataaatcattttgatattgatttatagcttaattccactatagttagagaaaatattctatatggttttaatcatttgaaatgtatttagacttgcctgatggccaaccatacggtgactttttataaatgtcctatgtgcatctgaggaaaattattgagtgcagtgttttatattggtcaagtttgttaattaggtatgtcattctaacctttcaggggttgggactattgtgggttagctgaatgtttttgtaaataatgttttatcagaacacagccacacccatttgtttacacattctgtacagctactttcattctataattgcagaacctagtagatgcagacaagaccatttagccggcagagactaaaatatttgtcatctgtctgcacctttacagaaagtttgccagcaatggttaatctatacccttttagctttttgtctgcctgttctctcagttactgagagaagtatgttaagaatttcccattatgattgggcatttgcggtttctccttgtgtctagcatactccattcctctatacttaacacactaagtatatgctctattgacttttttttgagatggagtttcattcttgttgcctaggctggagtgcaatggcatgatcccagctcactgcaacttctgtctcctgggttcaagtgattctcctgtctcatcctcctgagtagctgggattacagacacccgctaccacgccctgctaatttttgtatttagtagggatggggtttcatcatgttggccagatgtctcgaactcctgatctcaggtgatctatccgcctcagcctcccaaagtgctgggattacaggcgtgagctctcatgcccagccctcaatagaacttttatgcaccaaaagacatgtagaaaaacgttcatatcaacaatactcataactcccataagccataacaatgtctcttgatagtggaatggataatatggggtataatcatcaatggaatactacacagtaatgaaaaagaaacgagctactgctatatgcagcaacttagatgattttcacaacaaaaatattaagcaaaagaagccagccacaaaagaatgtgtaccttaggatttcatttatataaagatgacaaccaagcacatctatgatgtttttaagataataattacctttggagaggagagagaagatgagggcttctgggatgctacattattctatttttttaacctggtgattttcaagtataatcacttgaaaaaaacttaagagaccaatttctcttataaatgtataggcaaaaaaattttttaactttctactatgaaaaatttcaagcaaaagaacagtatactcaaattccacatattcatcatgtgacttcaagaatgacgaactcacatctaattttgttttatctataccaccattcagtccctctccagcaatggattatggattattccgaagctaatccaagatatcttttcattttttgatgcaaaaatattaaataaaattttagcaaataaaatccagtctcatattaaaagaacaaaccattattgacaagtatggtttattccctcaggaatacatgaaattgggaaatagagcaacacaaatcaaagaaaattttaaagagaaaaaaataaatgaaaataattgtaatggtcaaaagcccttaggaaagagaaataaaaacttgataaatcacagtaattatttattcagaccatactacgtacctagtactacactttgaacatacttaaagaacatttgctcacttaatcttcataatgattccatgaaaaagaaactatgacagcttttttccacaaataaggaaactgactcagagattaacgtacccaagtcagaggcagaggcaggtacttcttactccacagtccatacacttgccacctggctaaaattatttgcagatgacaaaaatgctcaactagaaaaaagacgtcaatttataagttatatgtaatgacatgagtacaatgaagtgacagaataaacatatatatttttaacttctgttcttgtcaactaagtaaaattaggaacaaaaaaggaaagggggaggggtcttatgcaaaaaaaaagtcacgatttacaacaaaaagtattaactatgtagaaataagcataaccagaaatgtccaagatacgtatggaaaaacactacagatagtcaaacaaataaaaatattgggttaatagaaatccatcacatgttcctgaaagtgttgtatctagatctacatcaattctacccaaattaaagcaaccacttgatgaaactgcagcaatttaaaaaactctcaaagagcatgtaatatgggaatacgaagttgacaagatgttattaaagacgaataaaattataccaatacctagacacctgatcccaacattaaacatgaaatacactaaaccagagttattttctggaggagtatttaaaatgatggggatgttattacttgggtcgcaatgaacctgaaaacccattttctacagaatatacagcagcagggaagcaaggggaccagcagacccctttttaagtacgcatgtgataagcaatgaacacgaactgcccagagcagtctccaacactgacacgattcgcttccccaccacgacgccctagcgctactgtgcaacgaagacctcccaagcactggttccaatgcggagaccatgggctcccagactctgggaactccaacacgactgcgaaacgaactccgagcgaggactccccgagagctccccgcaacacggacctcacgcgctagcgaacaacagaaaaaaaaaagcgcgctctccctgcccctgaaacattcccagaagcccacgcagaccagaccgatgacctgtctccactgctggaggcgagtcagggacccgaagtctctaaacactcgcctctacccgccgccccgcgaaccccacacactgcagacgcgacactcgcaagtttcggggatggcggccggcgagggccatactgcgtctttccggagacacggaatacggcaccagccgtccctttatgatgcaatatgtctgcgcccaggggacgcttgctgggagcagccattttcaaccctactgccgtagagcaggcggagtccctcttttcgcgccttaagacaggtaggttctgacgatgaaaagcaattgaaaacgacccatttcaccctttttccagtccacgtgaactgctagatcttggctttgcaacattagccaggggcgctacataaactgcttagtttctcaaaggctcaagcctgccctgatctgtctacaggatgggtagagatggtcacagacatttaggcactttgatcctaagaagaatggaaagaaaccatgtggcgcggcagtcttacaggaatttcaagagggagggacctgagcaacaatcggaggggttattactcctgaggatgcatctggctggagaaagcagcctttgagaactgcctaagaagtatctttacatctacatcagatgtagcctcagaggaaggagtcagtcatagaatggataaaacaaccgcgtgttaaagctttggttataattggtgtggagaatggagaacacagttgatcagcagttgacaaagtggggaaccaacacgaaaacagggctctctcaccctggaaaagccaaaggcagaacaagcctttacatccaggaaggtgggagcaacttgaaatcaaaactctgaaggggagatgattctgttcaatactgaaactcagctgatcaattaactgatgaattctagcaccaaacctgctccctataattttataaccagcctcagagaacctttaaagggattgatcattcactcatttatccagcgaatgtttataaaatgcctaatgtgtcaaacactgttgtgcgtgctgggaatacaacagttggaaattcaggcacaaagactctcattcatggagattacattctactggcaatttcagtgtgtgagctaaattgagtggtgctaactgttgacttggctggttgactgaaacttggactcaaaatttgcctacactaaatgaagtttaaatgccagaaatttcctcatatattataaagtacccaaagataaatggagtttggaatgctagaatgaatttatcatgtaaaatcaagattacccatacctcaaatatgtattccagtagcatctagaagacaatctcttcactgacactgatctggtcacaggaaatagagatatactactgtaagattattttattatacagtaagtgatataatgtccttgaagttagaatgataagttcatgattttctttcagtcagttcaggctactagaaaaaatacaccatagactgactgactgccttaacaaacattcatttctcacgttccagaggctgaggagtctctagaactggactctaaaacacaatcaaggtgttggcaggtctagtgtccagtgagagtccatttcctggtttatgcatggtcatctcattctgtcttcacatggcaaagagcagagaaagagaaaacaaactctcttctgtgttgtctcataagacacataatctcatcatgagggttccactttcaagatgtaattaccttccaaaggtcacacttcctaatgccatcccttagggattaggacttcaacatgtaaatttggagaggacataaatatgcaatccctcacaatgatgtatgctataaaatctcaaggaatcaaatgacaaggatttacagttaataagccaacaaaggagacaatatgtaatataaacacactcagctactctaagggaaagcagaaaaagaagaaaaggagaacaaagaagacatagaataaacaacaaatagtaagttagtaatttaaacctaaaaacatcaatacattgaacgtaaatgatctaaataccccagtaaaaagacagagattgttaactggataaaaaaggaaggcccaactgtatgttgcccactaaacacccactttaaatatgaaagcataaataggttaaaagtaaaaccatgataaataaagatatgaaagatataacagggaaaaacccatgtcaaattattagaggttaaaaattacaatttctgagagaaaacatactttggatgggattaatgacagattaaacactgtggaaaaaagattagtgaactgaaagacatagctatgagaactataaaaaatgaaataatgaagggtaaaataataaaaagcatgaacatcattttcatgtacatatgtgtatacacaaaaagatttgtgaacttgaacaaggcaagagatacaatctaaactacaaagagaacaaaagctaacccctaccttggcccccggagtaagagatatcattctgaggaacaccaagtggaagcctctaaaactgcccccctccccagccaaactctatgatcaagatagtaaatgaaaaacaatattgtgggaggggtagtgaggtttataagatataaaaaagtaaaatatatttcatatcttgtaaaccctactatacatattagtgcagggagccaaaggcccatgggacatgacaaactcagcattccgctggaggctatatgatcaaacagcaaactgtttatcatgaatgcaggatgtgggcaaactcacactgccctgccaccattgccacagttaccatattaacagggcttttcccctgcacatgttcactaggacttaagctgtgacttgctgtggaaggattttccaccttcactgaatccccccgtttctcccttgagtgtattctcttatgtttaacaaggcaagacatatagaagtaagctttctcacactcatcacagccatagggtctctctcccgtgtgagttctgtgatgtacaatgagcattgtctttgtaaggaaggctttcccacagtcactgcatttatagggtttctctcctgagtgaattttctgatgtctaatgagtcctgacttctgtgaacagggttgcccacattcaggacatacaaagggagtctttcctgtatgatatctctgatgtgctacaaggcaagacttctggctgaaggccttgccacagtcaatgcatccataaggtttctctccagtgtgagttcgttgatgtatgttgagattgcccttctgaatgaagccttttccacattcactgcatgtatgaggcttctctcctgtatgagttcgctgatgtacaacgagtagtgattttctggagaaagctctcccacattcgctgcattgatggggcttaattcccgtgtgaatcctttgatgttcagtaagctcagatttcctggggaaggctttcccacattcactgcacccgtatggtttctctcctttgtgagctctctcgtgttcagtgagcctgtacctcttgtagaaggctttcccacacaagctacacccgtggggtttctctcctctgtgagctctctcgtgttcagtgagcctgtacttcttgtagaaggctttcccacacaagctacacacgtggggtttctttcctgtatgaattctcttatgctcagtgagctgagacttcttgaggaaagctttcccacagtcagtgcattcatgggctttctctatgttgtgtgtttgctgatgtttaaggaattgtgacttggtgctgatgggttttctactttcagggaattcaatttccgtaggcatttgttcatgattatcatggagaaaagctccatctccattaaactcagcaggctcctttctgttgtatcttctgctctggttggttaaacctaaatatgatttcaaagttcttccgtgttcatagcgttgtcccgtcctcttcagtattttttggttttgcaagggctgctgcagatgatcatcagctttctcaatttctaagagagagaacaataaatccttccatgatcatcacacggaataaaactgcttcaaagatgccttggggttggctggctttttactggaacccctataataccaacatggaaggaattccaagtataagtgttccctatctgttaaaaaaacttttaagaattgtagttaaatacatataagataaaatttgccagctgggtgcggtggcttatgcctgtaatcccagcactttgagaggccaaggcgggtggatcacaaggtcaagagatcaagaccatcctggccaacatggtgaaaccccatctctactaaaaatacaaaaaaattggctgggcgtggtggcacgtgcctgtagtcccagctactcaggaggttgaggcaggaaaatcgcttgaacctgggagacagaggttgtagcaagccaagatcgctccactgcactccagtctgccaacagagcaagactccatctcaaaaaaaaaaaaaaaatttgccagccaggcacagtggctcatgcctgtaatcccagcactttgggagggtgaggtgggaagatcacttgagcccaggagtttgagaccagcctgggctacaatagggagactgtctctacaaaaactttttttttaatttaaaaaagaataatcctgagtagggaaacagcagacataggtagtagaataaatatcccagaaaggcaagttagaatgttggatacacagcctttgacttcatcctaatcctattagactgttgggtgctaaaatatgcccttctccattctgtagaccatcatcacgctaactttcctagagcaccaatctcatatttccaggaaaactgcagtcaatactctaacctttgttaaaacagagatcacaagactgatggaacagactctttgtagcaataagataccaaactataaactaggtctaaggacatacaggtaagggttaagtcacacaccccctacatttaaagaataaactatgttctaactgccacgagtgttttttgttttgttttgttttgtttctttttctgtagcagctaaacaaacactggccttgggacaagcaatattgaaacaattgcagctcccggaccaccagatgctgactaactgatgcccctcacccccaacagcattccacaggccataactgcagctatgattggacaggagactgatctcaatatccttctcctgataaacaccagctgttttggtcagctgccggagtctgtgcagacttttcttatatcctgtaaaagacctgctagcatacagtcaaattccacctcattttaatgttaaaactccactccaaaatgaaagtggattatatgttacatatatgtttgctcactatgcacatgtttgctgattctcataaagatattcataagactccccatctctcactgaataggtatgcaaagcaaatcctagaaggcaaaaagcctcctgcaaggcaaaaaaaaaaaagtttcccctcttcagtgatgtgtgttttttccacttcctcaaagtcacaccactcagatctgcgaatcatcttttgttagaatataaagtttctctttgcctcctcaattttttggttaacaccttgtatctacctggctatgatatattctcatatgttccaacagaaagagaaacagggtgatccctatggactttcagaacatgcaagcagaacacgtggtcctctccacacagctctgccactgcaccaaatatggaaactgtcaccttcttcatcatgccctacttgcacagatgtcatattggattttttttccactttgctgtccctaatatactaattcctcaccttgccactaacagcctctactctctgaattttgtacttatgtctctgttggcatcggtgaatggagccctcaaggaccacctccctacttctgaatcaagacttgaggcagctttacttttagtttttcttagaacatcagctatacagtatgattgctatagtactgccaccaggtgaaaggtaagctctacctagagctagaaaaatacaaaactttacctccaccactaccctgaattactggcacagaaaattcacagcaggagctgaacaataaaagttttaccattaccatgacgcatccactttaagttcccacttcaccatttcccagcaaatatcttctaactgtggcctccatgtgaccagtttcaagctaatcttttttttttctttttttttgagatggagtcttgctctgtcacccaggctggagtacagtggcacgatcttggctcacttcaacctccgcctcccaggttcaagcaattctcctgcctcagtctcccgagcagctgggatgacaggcacgtgccaccacgcctggctaattttttgtattttatgtagagacagggtttcaccacattggccagactggtctcaaactcctgacctcaggtgatctgcccaactcggcctcccaaagtgctgggattacaggcatgagccaccgcacccggccttcaggctaatcttctgacagtccccacatggccttgcatttccagttctacaacttcttgtcatatgtcttcatcttaattcaatacctagctatgtctcttgcataagatattttatcagtctgtctttctccatcttgtctagaccactgtaggttacatttcttctaaagtcctacaattctttctgtatttactattcactttaactttgtatagccctgaattgtaacaaaaacatttcacacgttcaaaagtttaatttgtaaatattacataaaaatttgccctatttttgctaacaaaatctttgctcaagaaagacatttctgtttctcactaaattcagtctcttctactgtgtattatggctacagttcatcaactcataaaaacagcccccgagagagcttcatgtaaagacacgcccaggcccccaactcaattctaacaaaaccagactcacagagcaagaggccttggtatggacagtgtcatgaaaactcctttaataaagatctagcctttaagaaatgcttaatagatggaaaagtatgacctctcttcagcctggctaatctgtccttcgatgaagaaatgcatgaatgaccaagatgtatttcaatcttacatgaagaagaatgaaaaccaggcccttgactccagagtagcaaaggaacctcaagcaccaccaaatcacactgatgtggtatctatgggagtggcttgtgtgtgattgggatgcaaagtagaatgggaatttagacatggaagatattattatattgtagtgtattaaaaaccatttcatgaaaagaaaattcaaggtgaaaaatacatagtgtcagaatgtgaaaaacaaaccataatcacataccgatgcctcagtttttttgtttttttgtttttcgtttctttttgttttttgaaacagagtctcactctgtcacccaggctggagtgaaatggcgcgatctcagctcactgcaacctctgcctcctgggttcaagtaattctcctgcctcagcctcctgagtagctgggactacaggcacatgtcaccacgcccggctaatttttgtatttttagtagagatggggtttcaccatgttggcaaagctggtctcaaactcctgactttgtgatccgcccgcctcagcctcccaaagtgctgggattacaggtgtgagccaccatgcccggcctcctatgcctcagttcttatctcacttgatgaatcagtaactctagacaatgcttatggcactctttctccctctctctcttatataaatgtatatatacatataaatatataaagtatatatataaatgtatatacacacatacacacacacatacacatatatacacacacgcatatacatataaatgctgttctagcaaattaatcaaacttgaggagagggtcttgggaacccctactttacagctggttggtcagaagctgaggtgacaacctgggacttgccactggcatctgaagtgggacacagtcttggactgagcccttaaccggtgggatctgatgccgtatcaggtagatagggtcagagctgatttgaaacagacgatacccagctgatgtctgctggagaattgcctgggctgtgagaaaacaacccctatatatccagtggcataaatgctgtgttgagtgactatgtgacagagaaaaaaacagtttgtcgtttttgcctcagaaacacaaaatgatcctctgacaagtgatgaagaagaatgggaagatgtgaaaatccaagcaagaagaacttaggggaagcaactcaacatctaagaagaaatgaatagggatcagttccaagaagagataaaggggtatgtatgcttctctgaattcctataagaaaaagagctcttgtatcctaggggagaagaagatgtggcagctgtttctgtctccctagacactttcacaactgtcatgccttctctaaatgaccagaatgtgacttccgctgccttcccctcttgctggttctctctcacttacctgggtgggctggactgtggatttcatcttctagtgtccatagtggttctccttgttccaacttggtgagggcatcaggtttgccggcttgataccctgtttgtgggaaatgggagaagacttaggctcactgaattgcaccacgtggctctgatgataggagaaaggtacatgttagggactgcataatttgcatgttagcaaattaaaggctttttttctaagacgaaggaagattatgcctcttcctgtgggaccagagacgggcctgaggatctgccatttgggagcacagcagacataccaaagcttccagaagctgagaaagcaaaggccactgactgggtaccctctgagtgacacagggcagctgtcctcacccactgacacaaggttgctgtagttctccaacatcacatcccggtacaggtccttctgagcagggctcaggaactgccactcctcccaggtgaagtccacagccacatcctccagggtcagtgattcctgtaataacacagtcctgcttaatatgtttctcttttattgacatggaagaaatatgaagttgttcggcccattttcaccacataagctgcacctgcacagttgtcccttggtatactcaatggaatggtttcaggatgccccacatataccgaaattgtgcatactcatgacctacagttggcctagtggaatctgcttatgttactctgtataagcgagtttcacatcctgagaatactatatttttgattcaagtttggatataagtggacccttgcagtacaaattcatgttcacaaataaactgtattcctagttttttaaatatactgtgaaagaagcaaagtcatagtaaaatattctatattttataataaccatgcagccatccattaatccaacaaatcataagtttctgtaatatgcagccattaaatcctcttgctaacatgagaatgtctgcagtgtttttcagcacctacttgcaaccctaaactatatgctacagtcatatagtacgtgcagaataatctagcatgacccccttcatgtaaactataccatgatatttagcaaaacaacaaataaactatgcagtggccataaaaaataagccatcatacatgtaagcattgacatgcatagatacatgtatatgtatacaacgcatgtatacacacacatacacacgcatgcagacatagatgtcctcacaggtaaatccctagaacaggaagacaagcatttgttagtgacatactagggaattaggaaaaaaagtatacagagggggaactttgttttcacactatgtgtactatttaacttgagtctttcacattgaaaatctatccatgaggccgggcatgatgtctcacgcctgtaaacccagcactttgggaggcaaaggtgggcggatcacccgaggtcaggagtttgagaccagcctggctaacatggctaaacatggtctctactaaaaatacaaaaattaggtgggcatggtggcacctagatgaagcatgagaatcgcttgaacccaggatgcagaggttgcagtgagcgaagatcacgccactgcactccagcctgggcaacaaagtaagactgtctcaaaaaaaaaaaaaaaaaaaactatgaatctgtggttctttctgacaccaaatacacagtgtcttttccagcaacactttctctgatgccaactgggtatcctagagttcgatgctatgctaacactaaccgctgagggttatcatcagactctgcaggtttcagggctcggtcccacaagactgccctcacatcatgtgccactctggggtccccacgttatcacacttctgtccaacttgaccacaactggaggttgccacaacctccctgctcaggttcgataatttgctagaatgactcacagaactcaggaaaatgtcacacaattacagtttattatataggatacaaatgacagccaggtaaagaggtacagaagtcaaggtccaaagggtgccaagcacaggagcctctgatcccatggaattgcagtgcccccttcccccaccccccacttccacatgtgatctccaaaccccatgggggtttttatggagcttctacgacgtgggcatgattaaatcatcaaccatggctgggtgcggtggctcacacctgtaatcccaacactttgggaggccgaggtgggcagatcatgaggtcaagagatcgagaccatcctggccaagatattgaaaccctgtctctactaaaaaaaaaaaaaaattagctgggtgtggtggtttgtacctgtggttccagctactcaggaggctgaggcaggagaattgcttgaacccagaaggtggaggatgcagtgagccgaggttgcaccactgcactccagcctggcaacagagcaagactccatctcattaaaaaataaaaaataaaaaaaagaaatcatcaaccattggtcacagaatctggaggtcgggggtgggactgaaagtcccaactctgtaatcaaggcttggtctttctggcaaccagccccatcctgaggttgtctaggagcccattctgagccacctcattaccataaactcaggtgtggttgaaaggcactggttatgaagaacaaaatacactcctatcactcaggaaattccaaaggttttaggagctctgtgccaagaaccagagacagagaccaaatatatatacgtgtaaaaccataatgagtcatttgcataattttttaagttaaggcattaaaagaggtgagaggttaataactggatttgaacacagggaagggctctgtattttctgagacaacatgacattctaaagcaaaccctgtggatctcaacaacccaagccattgccaaagagaactttcaactccctttggtcaaatctgtacttaaacaccagtttagtgacctgttcatggagctcctttgaaagcaaaccttgcattttttaggcaattaggtttactcacagataaacacagactgcaacaaggttgggtatataggccgcagtgctgtgagctctggaaaaactgtgttcattaaacccttcttggtatagtcccatagaggactcagaataatcatgtagaaacagtcacacaaaacttgcttgtgtatcttttggaaaaatgctgttaaggacaaaaagtctatcttgtcacctctagcaaaaagcatcaaactaatttcccaagatttaagtgccatgaaatactgacatcccctgaggaacggacccgctttctcctcagaatcagtgcacatcatgtaacttaccatgattctctgggtgtgatggtggccaaagattttggacacaagctgacacttaatgtagccaacagggtctggcagagtcgcacattatattccaacactggtcacatgtgaactatgtgaacaaagtatttgtgatcccactttgtcctggattaaaggtacagtctaagtctgtttctccccagagctcattttttccaatttatacttttaatgtaaatgaactgatttcttcagacttccacaaatccatcagggaatcgagttaagaataaaacaaaccaaaagttacctgggcctttgtcattttcttctgtttcaggaaatacccaagaactgggatgcttcgtctttggtttcttctggatcctccctaaattttggctaagaaatctgagtctccatttaagagtgttcccagaaatgatgacatccacatccaggaacctcctccttccttcatttgaactctcttgcttctggggagccaggacctatggagtaaaaatcaagttcatttggtgacacattccctccgggcccagatgctgtctctgctgctgtaaactctcctgcagtcaaggccaagcaatatatctaagcatccctttgtcaggtgtccccaagtctttacatcccagggcaataaaacaacactctgaatgtggggagtcatatggcagtgggcttaaccaggagccggcatatctggccactttccaatgcttcaaaggagtgtctttctccttaagcacagtgtttataaataagagagcaggtcacgctctggtcatgagaacgtgatggtaataaggaggctttcctcctcagaggcctcctgtgattttccaaaacttattgtcccatatttttatggccagtttatgccagcaccccataagcctttttcccaacaatcgtgagacacacagagaagaaacacacaggtaaaagagaaggccatgtgaagatggaggcagagactggagtgatgctgccacaagccaaggacacctgagagtctgttagaaaaggggagacaggtgaatgaatgtgggcagctgtgccggagcccctcaagaccactcccagatgcagtgattcactaggtgaactcacaacactcagtctataattatattcatggcaaccacttattactgtgaaaacatacacagcaaaaccagcaaaggtaaaaggtacatgtggcaaagtctggaggaaaccagacataagtttcaagttcagtctctttggagtcacacaggatacacttaattccccgagccacaagtcatgacaacacacgtgaaatgctatagaccaaggaagtttattagagagagattgtgtgccatggtttttattgggggctgatcgtgaaggtgctcactgcctaacattcaccaaaactccagaatcctagaggaaagcatgtgttcaggataaatcacattgtttgaaaaaaacagcttaggcacagtgagccactcttattaggaaatagtgggactgcctccaaaaatctaagctcccaaatgccagctgctatggtttgaatgtttgtgtcctccaaaattcatgttgaaacttaatctccaatgcaatggtatcaagaggtgggcttttagtaagtgattaggtcatgagggctcctcccttgtgagtggcattaaggcccttataaaagaggctttggccaggcacagtggctcatgcatgtaatcccagcactttgggaggctgaggtgggaggatcgcttgaggccaggagtttgaggctgcagtgagttgtgattgcaccactgcactctagcctgggcaacagagcaagaccctgtctcttaaaaataaaaaaataaaaaaaaataaaggccgagcgtgttggctcacacctgtaatcccagtactttgggaggccaaggtgggcagatcacttgagctcaggacttggcaacatggtgaaaccccatctctataaaacatacaaaaattattcaagcatggtggcacatgcctgtattcccagctactcagatggctgcggcaggaggactgcttgagcctgggaggttgagaggttgagactgcagtgagttaggatggtgccactgcactgcaggctgggtgacaaagtgagactctgtatcaaaaaaaaaaaaaaaaaaaaacctaaagaaagaagaaataataataaaaataaaagaggcttcacacacagatcggccctttctgctcttctgccttctgccatgtgagggcaccgcattcttcacctccaaagaaatagcgacaaaacaccatattgaaagcagaaatcaggccctcaccagacaccaaacctgctggtgcttcgatcttagacttctcagtctccagaactataacaaataaatttctgttgtttataaattatccagtctcagctatcttgttatagcagcaccaacaaggctaagacagcatcctataatttaattcagtctgagactgtgtatctagatatagtgtcagacaccacagattaagggctcagttcaagcctgcccccaacttcagacgcaagttgcaagcagcaggttgtcacctgtacctctgatggaccagctataaatcaggattcacacggcctcctcctcaggttcgattaatttgctggatggctcacagaactcaggaaagcacttaacatttactggtttatttcaactcttttcctgtctagaaaaacgaagtgcagctcactgccagcgcttatttcattttacataaacatgctctttgaggctgcagtaaatctgattttcaatgtgaaaataaaatataaaagctgttctaggagttatttctaaacagaactaacatcagaatcatctgaatcatcagaattctcgatttggaatcatcagaattctcgatttggtaaaaatcggatccatccagtgagtcttcagccaagaactgtttgagaatgatgttaacatcacatgtaggaatgctacgttttctaggatttgacattttcagtgatcgagaactactacattttgtaaatggaaataccactactaaaaacagaatgctataagtagaatgatgtcttttgtttcccaaggcgacctactagagcgatgtgaaaataataaaagtgagatcgttcatggcaaagttatctcggggtaaatgctccagctgcaagcaccaaaggtgagtattctcagggcaaatgggaaaaggaataaaggatattacgaaggatacagatgaagaggcagatggaagggatagcacagagcaaggtttgtagcaaggggcgtgggacttccatgccctccacggaagcttattagagactcagttcaccaccctcaggcacctccacatgctcaagaatctgtaagttccccagaagttcaccagtccttttgagtttttacgctggtttcattatgtgggcatacttgattaaaacactaaccactggtgatcaactcaaccttcaacttccctgttgccaggcagagctaaaatttccaaccctcaaatgacatggttagttgccctggcaaccagcctcccccgtcctaaggccagccagaagcccccagtcaccagccatctcaatgccacacaaaaaggcactgtttactgaagaggttccaaggcttttgggagacatgtgccaggaaacaggacaaagatcgattatacatttcttataaatcgtaacaatcatagctaggcgcgatggctcatgcctataatcccagcactttggaaggccgaggcgggcagatcacctgaggtcaggagttcaagaccagcctggccaacgtggtgaaagcctgtctctactaaaaatacaaaaattagccgggcgtggtggcgggcgcctgtaatcccagccactcgggaggctgaggcaggacagtcgctagaacccaggaggcggaggttgcagtgagctgagatcgcaccactgcactccagactggacaacagagctagattccgtctgggggataggaggaaactttgatccccaaatgctcaaggagactgatgcttaagcaaactaaatattgcctgagaacgactccatacttctatatttgagtccttgtggataaactgcaacctagcttaacagacaaaattgaaaaccgaacttaatcgtatgcacctgtaacaatagctgagtggtggccagtcccagcggccatactcatagactgctgaatgttccaactgcgttcaaataaggcaaacgccgaatggtaaccaatctcactgtttctggacctcgcttccgattcctgtatgtcactttaccttttttgtctataaatttgttctgaccacgaggcacccctggagtctctgttaatctgctgtgattctgggggctgcccaattcgcgaatcgttcattgctcaaggaaactcctgtaaatttaattcggcttcaatttttcttttatcactgatttgagtaataataaaactccggtctccccgcacagccggctctgcatgaattgctctttctccattgcaatttccctgtcttaacaagtcggctctgtctaggcagccggcaagggtgggcggttatagtttcacaactcaaccccagccaggggcctgggcttgtaaaataccagattttacaagcctctgagccccacatgcctgggcctccccgaaacacttaacacacatccccgattcaccccaaaacctacaccacacaccctcgtacgctgcccagcaccccggcttcatcaccgactttaaactgcagcatttggagtgataataatggcgtcggtgataaagccggcgtgctgggcagcgtccccctagagttctccatccagtgatccagaggcctactaacagagtgaccctcagagaccccaaactctgacgccgagtctcagtcgctgaactcgacagacctttaacgcccgaccacaagaactctcccacgccggaccgcaaaggcaccccaacccaaaggctccaccgcccaggccgccagctctccccacaggctcctcagaagctccctacccctttaacctactccacggagagacccaaacactcacctgattttcttctggctacacctaaattccctgaatgcttcctttcctggcccttaaaccccggcactggcctatggcggcggacgagggcgcgagtcaattctgccgcgctaggacgatgggacatgggcttctcttcgaggaggtaacatgtccgcgccctgagccacggctctctgggcgcggccatcttggtagatctgccgtacagaagggaaacagttgttcttgtgtcattaaaccgggatgactctcctgaaagcaaaaatttgaggcgcaggagcattttctagagtttatctgaacaaacagcaattcatgaattaggaagcatcaaaccaaaagaagtctcgcgcttctatgcttaaagcattagacacaagtattcacagggtgagtgaaggagtaaaacaaagaaattatttgattagttacaattataaaaatgcatttttttaaatttgccttggaaagtccctaatgacataatagcatgtgagttgcctacttttgatcggttgagattgagttttgtccttccctaacacaagcatttaccagaaatgactcaagtgaattgttgcttatgtttgcaggttaagcaaggttaaggctgtttttaaggcctactgggttttgtttgctcaggagtttttgaattctggtctgcattttaattttgctttgacacaggagacagtgaaatggcactgatgtgttccctctcctgacacctcaacccctgcactgtgaggttggagcactaacaacagtgcactgtggggaaaagaaagagagatcagactgttactgtgtctatgtagaaagaagtagacataagagactccattttgttccgtactaagaaaaattcttctgccttgagatgctgttaatctgtaaccctacccccaaccctgttctcacagagacgtgtgctgtgttgactcaaggtttaatggatttagggctatgcaggatgtgctttgttaaacaaatgcttgaaggcagtatgcttgttaaaagtcatcaccactctctaatctcaagtacccagggacacaatacactgcggaaggccacagggacctctgccccagaaagccaggtattatccaaggtttctccccatgtgatagtctgaaatatggcctcgtgggaagggaaagacctgaccatccctcagcccgacacccgtaaagggtctgtgctgaggaggattagtataagaggaaggaaggcctcttgcagttgagacaagaggaaggcatctgtctcctgctcgtccctgggcaatggaatgtctcggtataaaacccgattgtatgttccatctactgagataggagaaaatcgccttagggctggaggtgagacaagctggcggcaatactgctctttaatgcaccgagacgtttatgtatgtgcatatcaaagcacagcaccttcttcttaagcttgtttatgacacagagacatttgttcacatgttttcctgctgacactctccccactattatcctattgtcctgccacatccccctctccgagatggtagagataatgatcaataaatactgagggactcagagaccggtgccggcgcgggtcctctgtatgctgagcaccggtcccctggacccacttttctttctctatactttgtctctgtatctcttcttttctcagtctctcgtcccacctgacgagaaacacccacagatgtggagaggcaggccaccccttcactgcacaaaccacacagatattcagaggctcaaatgcaaccaaggctgttgcgggaagtcagggaccccaaacggagggaccggctgaagccatggcagaaaaacatggattgtgaagattttatggacatttattagttccccaaattaatacttttgtaatttcttatgcctgtctttactgcaatctgtaaacataaatcgtaaagatttcatggacacttatcacttccccaatcaatatccttgtgatttcctatgcctgtctttgctttaatctcttaatcctgtcagccgagaaggatgtatatcgtctcaggaccctgtaataattgtgttaactacacaaattgtacagcatgtgtgtttgagcaatatgaaatgtgggcaccctgaaaaaagaacaggataacagcaattgttcagggaataagagagagaacctttaactctgaccgccggtgagccgggcggaacagagccatatttgtcttctttcaaaagcaaatgggagaaatatcactgaattccttttctcagcatggaacgtccctgagaaacagaatgcgcacctaggggtaggtctctgaactggcctcccccgggcgtacctgtctcttatggtcgagattgcagaggtgaaataaactccagtctcccatagcgctcccaggcttgttaggaagaggaaattcccgcctaataaactttggtcagaccggttgatctcaaaaccctgtctcctgataagatgttatcaatgacaatggtgcccaaaacttcattagcaattttaatttcacttcggtcctgtggtcctgtgatctcgccctgcctccacttgccttgtgatattctattaccctgttaagtacttgatgtctgtcacccacacctattcgtatcctccctccccttttgaaactccctaataaaaacttgctggtttttgtggcttgtggggcatcacagatcctaccaatgtgtgatgtctcccccggaggcccagctttaaaatttctctcttttgtactctgtccttttatttctcaagccagtcgacgcttaggcaaatagaaaagaacctacgtgattattggggcaggtcccccgatacaaggccagcacagtgccaagtatgtccacctcagtgagctgcggagaggtgactgcaccctttattgactgactactaggaaactgtcaagaggcagcccactgagcatggccatcttaaaggaatttcaggtgtccctacaacagagaatatgccttgagaaagggggaaaaaataggccacttagcttgggtagacaaggctcatgacaagtccctgcatctcagctactgactttaaaagttgtttggggaaaagaaagagagatcagactgttactgtgtctatgtagaaagaagtagacataagaaactccattttgttctgtactaagagaaattcttctgccttgagatgctgttaatctgtaacctgagccccaaccctgtgcccacagagacgtgctgtgttgatgaaggggtgggttgcccctcctcacctgtgggtgtttctcgtaaggtggaacaagagtcttggaaaagaaaagacacagagacaaagtatagggaaagaaattagaggacccggggaaccagcgttcagcatatggaggatcccgccagcctctgagttcccttagtatttattgatcattcatgggtgtttctccgagagggggatgtggcagggtcacaagacaatagtggggagagggtcagcagacaaacacgtgaacaaaggtctttgcatcatagacaaagtaaagaatcaagtgctgtgctttagatatgcatacacataaacatctcaatgccttacagagcagtattgctgcccgcatgtcccacctccagccctaaggcggtttttccctatctcagtagatggaacgtacaatcgggttttataccaagacattccattgcccagggacaggcaggaggcagatgccttcctcttgtctcaactgcaagaggcatgccttcctcttatactaatcctcctcagcacagaccctttacgggtgtcgggctgggggacggtcaggtcttttccttcccacgaggccatatttcagactatcacatggggagaaaccttggacaatacctggctttcctaggcagaggtccctgcggccttccgcagtgtttgtgtccctgggtacttgagattagggagtggtgatgactcttaaggagcatgctgccttcaagcatctgtttaacaaagcacatcttgcaccgcccttaatccatttaaccctgagttgacacagcacatgtttccgagagcatggggttggcggtaaggtcatagattaacagaatctcatggcagaagaatttttcttagtacagaacaaaatggagtctcctatgtctacttctttctacacagacacagtaacaatctgatctctcttgcttttccccacagttgacttaaggtttaatggatttagggctgtgcaggatgtggtttgttaaaaaagtgcttgaaggcagtatgtttggtaaaagtcatagccattctctaatctcgagtactcagggactcaatgcactgcagaaggctgcagggacctctgcccaggaaagccaggtattgtccaaggtttctccccatgtgatagcctgagatatgtcctcatgggaagggaaagacctgactgtcccccagcccaacacccgtaaagggtctgtgctgaggaggattagtgaaagagggaggcctctttgccgttgagataagaggaaggcacctgtctcctgtttgtccctgggaatggaatgtctcggtgtaaaacccgaacgttcgttctatttactgagataggagaaaactgccttatggctggaggtgagacatactggcggcaatactgctctttactgcactaaaatttttgtgaaaagtcagacataaatctggcctatgtgcgcatcgaggcacagcacctttccttaaacttatttatcacagagatctttgctcacttgttttcctgctgaccctctccccaccattaccctattgtcctgccacatccccctcatcgagatggtagaaatagtgatcaataaatactgagggaactcagagaccagtgccggcgtgggtcctccgtatgctgagcgccggtcccctgggcccactgttctttctctatactttgtctctgtgtcttatttcttttctcagtctctcatcccacctgacgagaaacacccacaggtgtggaggggctggcccccttcagttgtgaggatcaatatgtatactcatattaaagattgttttttgcttcaggctgtttggaaaacaccaagcgtagaaacttgaaattgtgttctatgaaaaaactggataccaaagccactatcaaggtaggaggtgggacttgactcaagagaccaggctccaacaccagacaaaattaaggactagctaaaacagcaacagggcagaagcagcttttcataagacttacccaccagtatgccatgtcacgtttaccatttccatggtaacacctgggagttattgctgctttccatgacaacaagctgatgacctgaaagttaccacctttttctagaaatttatgcataatccaccccttactttgcatataattaaaagtgggtagaaatatgactgaagggctgcctctgagctgctactctgggcatactgctccacaaggagtagtacctctgctgctgctgtgcactgccacttcaataaaagttgctatcaaaggctgggtgcagtggttcatgcctgtaatcccaacaatttgggaggctgaggcaggcggatcacgaggtcaggagtttgagaccagcctggccaatatggtgaatcaccatctctactaaaaatacaaaaattagactggagaccatcattctcagcaaagtatcacaaggatagaaaaccaaacaccgcatgttctcactcataagtgggagttgaacaatgagaacacacggacacagggaggggaacatcacacattggggcctgtcgggggtgggggactaggggagggatagcattgggagaaatacctaatgtaaatgacgagctcatgggtgcagcaaaccaacatggcacatgtatacctatgtaacgaacctgcacgttatgaacgtgtgccctagaacttaaagtatatttttaaaaaatacaaaaattagctgggcatggtggcgcgtgcctgtagtcccagctacgcaggaggctgaggcaggagaatcacttgaacctgggaggcggaggttgcagtgagctgagatcgcgccactgcactctagcctggaagacagagtaagactccatctcaaaaaaaaaaaagttgctatctaacatcactgtgggacccctgaattcttttgaaatgtaagatgaagtctttttgcaaaatggagttagttatgtcaagagtgctctgtacatgttgcgaactcaaaacagacaactccccattttctctctttttttcccccctgagatggggagtctcaccttgttgcctggagtgcaatgggacgatcttggctcactgcaatctcgtgacccactatgcttggccttaatattttctactatagtttatgctaaatctttttagagaaatccttccccacatcaagatcataaaaatattatcttatatttccttctaacacttttagagttttgctgttcaattcagggttccaggggttagcaaactgctgctcatgagccatatccagtccacagcctgctttgcccttgagctaagattggcttttaatacttttaaagagtaaaataaatagaatatacaacagagatcatatgtagcctgcaaagcctgaatacttactatctggtcttgcaccaaaatagtctgctgacttttatagtctaatacacgaaacattgatttgtgtaggatatgaagtggcacctgtaatcccagctacttgggaggctgaggcaggagaattgcttgaacctgggagacagaggttgcagtgagtggagactgcaccactgcactccagcgtgggcaacaaagtgagactccaactcaaagaaaagaaaaaaaaatcccaaaactccccttaagatgcatataccagcttacctacaatatctttttttttttttttttttttgagacagtcttgctgtcacctaggctggagtgtagtggtgcgatgtcagctcactgcaacctctgcctcctgggttcaagtgattttcctgcctcagcctcccaagtagctgggattacaggtgtgcatcaccacatcctgctaatttttgtatttttattaaagacagggtttcaccatgttggccaggctggtctcgaactcctgaccacaagtgatccactcgcctcggcctccaagagtgctgggattacaggtgtgagccactgcacctggcctgtcttttgaaaataggtggatgatctaactctgttttaaaagcctgattttggctgcaacttgtgtatataaaagacttctcagcaatcttgtgccttggttcccctgaaacaggtacctcacctatatttggtagttggtgatctggagacaaatagtatcctgtgtgactgaaaaagatccctggaatctgtgcctgtgtgtctcagaacatcatcatatttacatgtattttatttcattggattttatttttcatgctgtactgtagcctttgtctttcttggagtcttaggtaagtataacttgtggagtcatgtgagactgttcaacatcttaccctgagtaactgctataattgcagtcacctattttagggaaaaacattgtacttgaaaaggaaacatatttttgtaaaattaatatcaagttcagtgtattttataatttattctcaatttaagaaaaccgtttaggggactttgctgctacattctagagagggattaataaaaacatgtctcacatttggcttatgttgtttcaaagggaaacacatcttgcacaccttgtggctatgaaggaaagagaggcttattttatttgactataggatcaagccacattatctattcatgcaataaaaccaggactgcaaaaattatttaatttccatctctctgatatcagggactatctctcaaactatttagaattcagaagcggcataaaacctgtgaagactcatcttcctcaatccccaagtatttcgttggtttacaagaaacaaaaccctgtataaagatgacggcttctactatatttcatccaatctgagatacctttggttgtatggcacaccacacttttacacaccaagttctccatttaaatatgttaagccacatatataaataagtatgccacacttaaattttagcagtggtaatatgttggaaaaatgtctatcttagaattgatgagataaagttttacccaagagtggcacaacatcttccagacccatttacaaatactagcaaacactacagagataaagataaacagtattgtattgagttttttactgaaacaatgaaccacagcagttctgtggggagtcgaaagcctgagggtcgtgaccaattcagcattccactgcaggctatatgatcaaacagcaaactgtttatcatgaatgcagaatgtgggcaaactcgtatctgcacctgccaccagaaagtatgctgagggcaatcactgcctggcaccatgctccttgaggttatctactgggacatctggagcctactgttcaaagaatgcagtcatgcaggcctgcactaaatcaagcagctgaccgacaaccacccccgctccttgttttctttactcaataaatatgaagtgctatagaagctcaggggccttgttcactagaagcaagaagcccccgaccccttcttccaaacatattcttttgtgtttgtctttattcccacattcatcctcctttgttcagtccagtagggtccgtggcacagatcaattataagttacgtagcattatacaaagattcaatgcagatattctatgggaagtctttatgcacatttaatcatacatactacaaattcacaattgtgatgttaacacatgcagttcccaaatatgagcaatcatttttacaataaaaataggcaaaaacacttaaatatttggtattgttcttatattttttgctttgttttctgacaagcatatttatttacatatttaatacaatactttctataatgctgattatataacaagagcagaaaaaaaatacagatgaaagcatgatttcccagattcattaacatacaaaattacaaatttcttttttcttttccttatttatttatttattttttttttttagacaggctgtcacccaggctggcaaaatcttggctcactgaaacctccacctcttggctcaagtaattctctgcctcagcctcctgagtagcactatctccagctaatttttgtatttttttgtagagatggaaccctatgttgaaaacactggtctcgaactcctaagctcaaacgatccttccaatttggcctcccaaagtgctgagattacaggtgtgagccactgcacctcacctaaagtacagaatttcttccttagtgtcaattatctgaaactgatgtaactgcatattatgccaacaacatccccataatcagtaatacatagatgttccttcctgtgtgttccctctggcttatattcaattgacatttattgaaacaggtattacctcctgactggcatcatgcccagcactattctctgataagaaaggatgtgtaagcttgaaattaaggtttgttcacatttgctgcagccttgaggtttcactcttacattaaccttgtggtataatgagctagtccttctcactgccaactttcagatattcacttcatttatgatttctctcctttgtgtgttttctgatgtagaatgaggctgaatttgcggaagaaggttttccaacactcagtgcattcgtaaggtttctcacctatatgcgttctttgatgtataataagatgtgacttctgggcaaaagatttctgacatttgctgcattcgtggagtttctctcctgtatgtgttttctgatgtcaaaccaagctaaacttgacggggaaagttttcccacattcactgcatccataggatttctctcctgtatggattctctgatgagtagtgagactaaacttacgagagaaagtcttcccgcactcaaggcattcgtaaggcttctctcctgagtgaattctctgatggatcaggagataggacttccggctgaaggctttgtgacattctccacattcctaaggtttctctccagtgtgagaccgctgatgaatattcaggtgtgacttttggctgaaagtcttctgacactgactgcattcatagggtttttcccctgtatgagttctttggtgtaggatgagactaaacttgatggagaacattttcccacattcgttgcatccatagggtttctctcccatatgagttctccagtgagtattgaggaatgactttacactaaagccttttccacattcactgcagtgatacggtttctctcctgtgtgagttctctgatgtctactgagctcagatctctggatgaaggctttcccacattcattacacccatgcgatttttccccggtatggattttttgatgtaaaatgaggttaaacttaagggggaatgttttcccacactcatcacaaccatagggtttctcttctgtgtgagctctctgatggatcatgagctgtgacttattgctgaagcttttctgacatttgctgcatccatagggtttctctccagtatgagttctttgatggaaagtgagttttgacttatcactaaaacctttttgacatgtatgacactcaaagcatttctctcctgtgtgagttcgttgatgtttattaaggcatgacttatcagtaaaagctttcccacatttattgcactcataaggtttctcttctgtatgggttctctcgtgtaaaatgagacaggacttccatctgaaggctgtctgacatctactgcatccatagggcttctctcctctttgtgttctttgatgcttaaagaggtccaacttctgggaaaaggctttcccacagtcactgcagtcatactgtttctctcgtttttgagttttccagtgttttatgagctgtgacttatgactgaaagcctttacacgttcattatattcattgtatttctcttcagcatgaattttctcatgcttaggataaagaaaaactttgtcatatccattacattcaccttcatttcttgcatagcttctgttttgaataaagtactctagattaggattcaggtgtttcccaagtacaaaaggggtatgaaggtttgagctcagatgagatgttatgttgccaaatatatgatatttgtggtgtctgtccatagtttcaaggctgctttggttttctcggtgccattctgtgtgatcattgacttgccaggcatcttctagaaaggagaccaattaatccactgtgatcatgtaataaaaggagtagaagctcacagcaagagccaaggagagaagaggaagtgaaactgtgggtagagaatgaaagtctgagatatttataaatggaagaagaaaaaacagaagaaactatgagaggtatgaaacacatacaaaatgaagataagggaggaaaatttaggaatacttgaaaatagggctatgactatgaattagggggatgaagacagggaaaagcaagtaaactaaagatgccagggagaaagattaaccaggaaagcaagttctgagatgagccagagagggatttgatcagagtacctaaaagaagaacatggattcttttaaaagccaagcaaaagagttctaatatggagcaactaaaaagtggaggcagtattaaggtatgtgaggagcttatgtcagctgttcttagtcacattcacaactttaagaacttcaaaaacatttctccaaacagcatttcagagatgcccccctacttctgttcaactgggatattactttaagttctcctataggactggtttttcacttacctggacaaacctgactctggatttcttcctctagtatccatggttttccttgctccaaccagaataatgtgtctgctttggtaacttgataccctagaaaagtatcaaggaaaattataaaggacacatgaatgcaaatactagggctacaagacttctgaaaaatgatgaagattacttttttttttttttttgagatggagtctcactctgtcaccaggctggagtgaagtggtgtgatcttagctcactgcaacctctacctcccgggttcaagtgattctcctgcctcagcctcccaagtagctgggactacaggtgtgcgccaccacacccagctaatatttgtatttttagtacagacggggtttcaccatgttggccaggatggtctcaatctcttaacctcatgatccacccctcttggcctcccaaagtgctgggattataggcatgagccaccatgcctggccgaagattacatttaaggggttaaataatttgcatctgggccaagtaaaggccttaacgtccattggaaatgagagaaaaacactctgttagaggccagaaaagtactaaaaatctatgatgtattaaactgaagtctaaaaaaagtaaagtatttgtgaggccccacgctttttaattactcagaaaggaagggcaattgattgcctacactacccaggaaaactgtgcttacccagtgataccaggttgctataattttccaacatcacgtcttggtacagattcttctgaacagggtccagtagctgccattcttcccaggtgaaacccacagctacatccttgaatgacagtgagccctgtaatagaacattcctactcaattctaaaggattaccattgtgtaatgctatgaacataaatgataatttcttataatacattttcccagagtaagttatttggctgccttccatgtaactagttttgccttataatatataggaaaaatgttttagttaaaatatcctatttcggtacttccattcattcactgattcacatatttaattattcattcacaaaagagaaacagaacctccttacatcctttaataaaatatttaatctgcaacagcagtccccaactttttcggcaccagggactcgttttgtggaagacaatttttccacatactggggcaaggggatggttttggaatgattcaagtgcattacattaattgtgtactttatttctattattattacattgtaatatataatgaaataattatacaactcaccataatgtagaatcagtggtagtcctgagcttgttttcctgaaactagatggttccagctgggggtgatgggagacagtgacagatcatcagacatcagagtctcataaggagtgtgcaacctagatccctcgcatgtgcagttcataacaggattttcactcctagaagaatctaatgctgcctctcatctgacaggaaggggagctcaggcagttatgtgtatgatagggagtggctgtaaatacagataaagcttgctcactgacctggtccacttcctaacaggccacagaccagtggcaggggttgggaagccctgttctagagaatcattgagcctgagggtgggcaagggacactcaactaaaattcactcaaattcacatttagatatgtcaatgctgatacaggaaaccataagaatacacaaaaatgtttcaagattgattattttaaagatggtgaaaaaggattaagagggaactttcaggttttgcactataaaattctatattgtttgaaagtttgacactgcaaatttttttttaattcattcaagttggagaagtattataatgatgatgattttgtttagagacagggtattgctctgttacccaggctggaaggcagtggcatgatcacagctcactgcagccttgacctcctaggctcaagcaatcctcccacctcagcctcctgagtagctggaactacaggtgtgtgccaccgtgctcagctaacttttgtatttttttgtagagacagggtcttactatgttgcccaggctggtctcaaattcctgggctcaagtgatcttcccacctcagcctcctaaagtgctgggattacaagtgtgagccaccatcgcccagctcacattgtgaatattttaagcttcatttatataactggaattttaaaaaaataagtagataagtattggctttgaacagagagctaacactgcattcttgggtgtgaagagattatgaagggaaactctaagactctgtcaacataacttggaactgtttactaatcaatgtaaataggagtttctctacctcagcactacaggttgagcatccctgcttcaaaattctgaaacctataatgctccaaaatctgaaattctttttagggctgaggtgatgcacaaaggtcatgcttgaaggaaatgcttaccaggacatttcaaatgttggattttcagattagggatgctcaactagtaagtataagtaagtaagtaagcaagcattctgaaaaaaaaaaaaatctaaaatctgaaacacttccagtcccaagcatttctgataggggatgctcaatctgcatttgttggaggccgagaaaatgggggttgtgaccaacccagtataccactggaggctatatgagcaaacagaaaactgttctcatgaaagcaggatgttggaaaactgacaaattgcatctgccaccagaaggagtgccaagagcagtcacaccccaggcagagtgttccttgtggtttgtagggagccaaaggcccatgggacatgatcagctcagcattccactggaagctacatgatcaaacagcaaactgtttatcacaaatgcaggatatgggcaaactcacgactgtgcctgctgacagaaagtttgctggcggctatcattccctggcgctgaggttatctgctgggacatctagagcctgttgtttgaggaatgcaatcttgcaagcctactctggaccaaccaactgaccccttcttccacaccccttctcactatcccttttgcctaataaatacaaagggctgtgtaaagctcagagcctttgtccactagaggcaaggtgctccttgaccccttcttccaaatatactcttttgtctcgtcttttattcccgcatttgccccactttgttcagcccaccagggattgtggcaggttacatagtggccccccccaaacagtgacagaatcgagtgctccacagtggttatctataggaacatctgaagcctgttgtataaagaaagtaattatgtgtacctctaatgaatcaaagcagctgaccaaccgttacctctctctccctattgattctacctaatacatatgaagggctgtagaagctgagggctgtctttgctcactagaagcaaggagtcccctgaccccttcttttaaaatgtatctttttgtctttgtcttcacttctgcatttgtcccatttcgttcaatcccataggaacagactgtaacaggcattgacattttggtttggagaattctttattttggggcactgtagtgtcattgtaggatgcttagcagcattcttagcctctatccactagctccaattagcacaccctcctttcccaggtgtgacaatcaaaaatttctccagacattgccaaatgtcacctggggtcaaaaaatgaaaaccactgataaaaaaaaaagcagaatattgaggactctttgtggaagaccatatgatggtcatagaatccatccatcttaaaaatctctacattttatccctgaataaaaacagacccccaggaggctgtggactttggctacactgttctgggtccctgaagcactctgatcactgagtttggttttggtattacaccactggcttatctgtgggggcactaacttctatatgatctatatcatgacccatcaaagaaatttcttcttaagtaacatgaaatattcacttttctagaggagctttctcctcagggaaaaggaaacgatttgttattgtgtccatgtggtagactgcatttcccaaagatgaccacaataatatctcacattccaaagaaaaccttctgctaaatcttgccactcccacacgaagagatggagcctattcccttcccccttgaacctagctagtcttggtgatttgcttgtacctgcagaatacaacagaggtgacacaacataacttccgaggctaaggcagaaaagcatgggggaaagaatgagagatcagactattactgcatctatgtagaaaaaggaagacaaaagaaactccattttgatctgtactaagagaaattattctgccttgagatgctgttaatctgtaaccctagccccaaccctatgcttgcagaaacatgtattgtattgactcaaggtttaatggacttagggctgtgcaggatgtgccttggtaaaaatgtgtttgcaggcagtatgcttggtaaaagtcatggccattctccagtctcgagtacccagggacacaatgcactgcagaaagccacagggatctctgcccaagaaagcctgtgtattgtccaaggtttctctccactgagacagcctgagatatggcctcatggaaagagaaagaccagactgtcccccagcctgacacccataaagggtctgtgctgaggaggattagtgaaagaggaagacctctttgcagttgagataagaggaaggtatctctctcctgctcatccctgggaatggaatgtgtcagtgtaaaacccgatcgtacattctatttactgagataggagaaaactgccttatggctggaggtgagacatggtgggggcaatactgtctttacttcactgagatgtttgtgtaaagtcaaagataaatctggcctatgtgcatatcaaggcacagcacctttccttaaacttatttataacacagagtcctttgctcacgttttcctgctgaccctcttcccaccattaccctatagtcctcccacatccccctcaccgagatagtagagatagtaatcaataaatactgagggaactcagagaccagtgttggtgcgggtcctccgtatgttgagtgccggttccctgggcccacttttcttcctcgatagtttgtctctgtgtcttatttcttttctcagtctctcgtctccaccttgtgagaaatacccacaggtgtggaggggcaggcctccttcatctggcacccaacatggggcacgaacccatgaccctgagattaagagtctcatgctctaccgactgagctagctgcagaatgcaacagaggtgacacaacataacttctgaggctaaggcagaaaaggccctgtggccgcatcttggctgtctcagagccagcatcatgctgtgagaagcccatccatgtcacatgtggaggtcacacacaggtgctctggctggcagcctccttgagcctagttttcaagtaatcccagcctggcacacagatacagagaggaagaagccttcagatgattccagtccccaaccttctgagtcttccagttgagattcaagacatcatggtgtgaagacaagctgtgcagtaaaggataaacagagcgagtctgggttacccagaaactgaacattccaaagaaaggctcagcccttccctatacctggcaggtaacttctaaaccaagcttgtccaacctgcggaccatggggtgcacatggcccaggagggctttgttttgttgttgttggtggtggtgcacacagcccaggagggctttgttttgttgttgttgttgttgtttttgttgtttgagatggagtttcactctgttgcccaggctggagtgcaggggcacaatctcagctcactgcaacctccaactctcaagttcaagcgattctcccacattcgagcaattctcctacttcagcctcccaagtagctgagattacaggcatgtgccaccatgcccagatagttttttgtatttttagtagagacggggtttcaccatattggcaagcctggtctggaactactgacctcaagtgatctgcccacttcagcctcccaaagtgctgggattacaggcataagccactgtgcctggcctccaggagggctttgaatgcaaaacaaatttgtaaactttcttaaaacattatgagattttttgagttttttttcttttttctttaagctcatcagctattgttagtgttagtatattttatgtgtggcccaagacaattcttcttccagtgtggcccagggaagccaaaagactgcacactcctactctaagccgttggaatatattgtccgatgagggtctttgtttactgggagccttgggtcacacaagatcgtctatgctaacaatgtatgatggaagccttgggccacactgtagttatggtggcctctgaaagggctgaagaataaggtcagccactcatgtgctcagcctcacccatataactaaagccaaataaaaaccctggacacccaggctcaagtgggcttcctgtactggcaatacatcatgcctgtcgtcacacatcatggctaggacaatcaaacattgtccatatgactccacagagagaggaaaactcaaagcttctgcacagcatctcccaaaccctgccctacacacctttctctgtttctgattttaactgtatccagtctatgtaataaaataaaatcatgaatatgacagttttgctgagctctgtgttattctaacaaattattgaacctgaggaaccccagatcttgcgatccccagaacatacaagccatcaccatgtctcacttcctgactcagtgaatccatgcagatcataaaagtaaattcacatctctaggtcttgggctggcttgctatatagcaacagattacttggaatagggaaacagtcataacaacattttagtccatgatgggttgcacacacaatggtggtcccttaagattataatggagctgccaacaaacatatgaaaaaaagcttatcatcactggtcattagagaaatgcaaatcaaaaccacaatgagataccatctcatgccagttagaatggcaatcatcaaaaagtcaggaaacaacagatgctggagaggatgtggagaaataggagcactttaacactgttggtgggagtgtaaattagttcaaccatgtggaagacagtgtagcaattcctcaaggatctagaactagaaataccatttgacccagcaatcccattactgggtatatacccaaaggattacgaatcattctactataaagactcatgcacacatatgtttattgcagcactgttcacaatagcaaagacttggaaccaacccaaatgcccatcaatgatagactggataaagaaaatgtggcacatatacaccatggaatactatgcagccataaaaaaggatgagttcatgtcctttgcagggacatggatgaagctggaaaccatcactctcagcaaactaacacaggaacagaaaaccaaacagcacatgttcttactcataagtggcagttgaacagtgagaacatatggacaaagggaggggaacatcacacaccggggcctgttgggggttgtggggctagggaagggatagcattaggagaaatacctaatgttggtgatgggttgatgggtgcagcaaaacaccatggcacatgtatacctatgtaacaaaactgcacgttctgcacatgtaccccagaacttaaagtatatattaaaaaaaaagattataatggagctgaaaaattcctgccatctagagacgtggtagccatctcaaggtagtagcatgtgttactcagttgtcagtgatgatgctggtgtagacaaacctactgctcttccagtcatataaaatacaacacataaaatatggatagtatgtaattcttgttaatgatatacatgactatgttaccagtgtaggggaaagaaagatagatcagactgctactgtgtctatgtagaaagaagtagacataagaaactccattttgttctgtactaagaaaaattcttctgccttgagatgctgttaatctgtaaccctagccccaaccctgtgctcacagaaacatgtgctgtgtcgactcatgtccaaggtctaatggatttagggctgtgcaggctgtgctttgttaaaaagtgtttgcaggcagtatgcttggtaaaagtcatcaccattctccagtctcgagtacccagggacacaatgcattgcagaaggccacaaggacctctgcccaagaaagcctgggtattgtccaaagtttctccctgctgagacagcctgagatatggactcatgggaagggaaagacctgactatcccccaacacaacacccataaagagtctgtgcctaggaagattagtaaaagaggaaggcctctttgcagttaagataagaagagggcatctgtctcctgctcatccctgggaatggaatgtctcagtttaaaacccaattgtacattctatttactgagataggagaaaactgccttatggctggaggtgagacatgctggcagcaatactgctctatactacactgagatgcttgtgtaaagtcaaacataaatctggcctacgtgcacatcaaggcacagcacctttccttatttatgacacagagaactttgttcacatattttcctgctgaccctctccccaccattaccctatagtcctgccacatccccctcaccgagatggtagagatagtgatcaatgaatactgaggaaactcagagaccagtgctggcaggagtccttcgtatgctgagtgctggtcccctgggcccactgttctttctctatactttgtcagtgtgtcttatttcttttctcagtctctcatcccaccagatgagaaatacccacaggtgtggagaggctggcccccttcataaggttgttgagatttatctatgttggtgcatgcatctatgatttgttttttattattgttcagtagtattccagggtatgattacactgcaatttgcttatacattcatgtactgatggacacttggactgtttcctgttcagggtattatgcataaaggtgctaagaacattcttgtgagtctttgtgaggacatatcatttcattactgttgtataagtatctaggagtggaattcctgagtcataagattcttgcttttattttgcaattctcctaaggagtcatatagttctgtaaagcttttcactcttcacagatttgatattttaagtaacacggtatgtttctgaaatggagtttgcattttggggcattttctatagatgtatcatgaaggacacgtgaaaactctgttataaatataaacactccactgcatgcaggaatttccttctcattcttccaatggaattgtcttaatttaggttggatcagaattagaatttacgttatgatgactatgtaaataatatttataggtcagtcaggtagtatcctatgattacttttcttgcacaacttttttttttcttttttctttttttcctcatgaaggggttgccaaggctgtgtagtgcagtggctattgataggtgcgatcatagctcactgcagcctggaactcctgggctcaagcgatcttcctgccttggtctccccagtagctgggactacacgtgtgcgccatcgcgcccgggcttgcacaacttttcattctcccagagtcgccttatttattccttccagaattttaggcacttggttctccgaaagccccgacgttaagattgactccacctacagcagagggaaggcccttcttctctcttaaggaaaattcccgcctcccgcattggattccttttccggttggctggtggctgctctctttacctgcactgggcggtgaccgtgtccctcaaatgtaaatgaggttccaggggtcgctgttttttcactttccgttgacggggtgaacaatatcctcgtacctcgattgcctctccacacccttttggtcctcaaaaatcttcctcttgtcctccacatgtagctagatgcgttttcgcggtatatgactcagggtgcgattgctctttttcctctgtggagaaagcgttttcacttgtacggacacctaagtgttaagatggccgcgcccattgtgtcattcccgtcattctttgtgcaaagcggatgacttttctccccagcccgctaaggtgcacgtagccataccatgtttgtcttggctaagctcgaccctctgaaaataaatgaaacttgggcgcaggatttaggtgccaaaatatggagttcttcaccgtcccgcgctatccctgaatacttgggcagaaaaggtccactttaccttccgtacgtgcaggattcaaagatggctgcctccagtatccgtgacgagaggacgcgaacttactacctcccagtcgtccgtgctccgtacacctgcaacttcagaccttcctcggccgccgtaggccggcttggaggctgggggagggcccagaagtggaataattcaggaaagtgcaggttctgggaagtctcggtgggttccccgcaaaatcaggtctgtgtgtgggtctgtctgtcaggatgaggggaggagggtgtctgtgggcgtccgtttagtgcggagccgtggagtttgtgggggaagcgggagcaagtgggagtcggggtattggggttggggcgtctccggagtcagccctgagggatcccagtggtcggtggtcagagtctgtccagagcaacacttggaagtccgtgatcagggtttggtgcctttgcgggtcactctgtagggctcggtgattgaggactggagtgaggagtggtttttgtcaaggaaaactgtgtctgcttcggattcggggttttattttttatttttgagacagggtctcgctctgtcacacaggcttgagtgcagtggcgcaatcgtggctcactgcagcctccatctcccggggctcaggtgattttcccacctcagctttcccgagtagctgggactacaggtgagcgccaccacgctatctatctatctatctatctatctaatctgtctaatctaatctatctatctatctatctatctatctaatttatctatctaatctatctgtttattgcagagacgggggtctcactatgttgcccaggctggtctccaactcctggcctcaaacgatcctctcaccttggcctcccaaagtgctgggattacgggcgtgagccttcgctccaggctgtaatcaggatttaatatgcgactcagtgaggaggagcccgggttcatgtgaacctaggtgtgtggtccaggtttttggattaatctaagggggtgtgaccatgttagggaggtctagatgtgacagtcgtggagaagcttgtgaaggctgaagccttggcagccagggcatcctgattggtgtgtgtgttcaggtccaacggtacattccctctcagtcccttttaagtttctctgcaaggactggtttacaaatctcatttgacttctcacatctctcctttctctcatcctggtaaataggaaagctttggggaagatcaaagattaatcaaatctaaaatggtaaggtggcctggcgcggtggctcacgcctatattcccagcatttgggaggccaaagtgggcgaattgctcgagcctagaagttggagatcagcctgaacaacatagcctgtctctccaaaaaatacaaatattaactgggtgtggtaacacacgcctgtagtctcagctactcgggaggctgaggtgggacgatcacgtgaccccgggagttctaggctgcagtgaactatgattgagcactgcactccagcctgggcaacagagtgagaccctgcctcaaaaaaaaaaaaaaaagaaaagaaaaggagaaaagaaaaaggaaaaaacaaaacgaagaaaatgataaggtttctattaaagattttcgttcttcttcctcaggtttactgtgtgaatgtgtgtatacacacacgtaaatattttctttcaggttctgacacaagtaaaacatctctcttatcccaaaatgtgttccccagtaatgacttttgataagatttttgtatatttcaatttcagttttctatgcttgattttcacaatgcagataagctgctgaaacattggtataatttgccgtatttaattttacattatgaacgttcttatagtaaacatatcatccatgtttttgtttaaaaatttttttttaagatttctgtaatagtataccatcaagaggcaaaactgcaccactgtgacttgaatcactaagtgtatggatatatttagatagaattttaagacttaaaaagttcacttatcacttttaagaatgggttacaattctatgtttacccaaacatgtttctccctgaccctcatcagcaccttagtttttaatttttttgcaattgtaaatggtgtgtttttaattttgacctttctgttctcttctaatttactcttacatagaagagcaattagtttagaaaatatttacattgtttttggtcaccttactgaacaaacttccctgttctccaggttacaaaaactttcaaacatataacatgatttaaagaactttacaattgaatacctgtttgcctaccatctggattttatcatcattttattgtgtttcttttattacatatctatctatatatcatccttctactcatcattaatccacctttttttctttttatagagatggcatctcactatgttgcccaggctgatcttgaactcctgacctcaagtgatcctctctccttggcctcctaaagtgctgggattccaggtgtgagccacttcacccagccacatttatccatcttgtaaaatattgctttgttttttggtgcatttcaaagtaagttgcagacattcatacatttgcccctgaatatttcagtaggtttatcataattaagttctactgacagcttttcctaattacaggtctattagtcccatactgtataattcagtggcttttactatgtgcggccatcaccaaagtcaactttagaacattttcatcacttaaaaagaaaccctgtacccttttgttaccactccctatgccctaccactaagtaatctctaatctactttctgtctctatagatttgcttattttgacctttctgttttcttctaatttactcttatttcatttcatgtaaacgctacaatataatatgtgatcttttgtgactggtttctttcacatagcataatttttttttttttgagacagagtcttactctgtcacccaggctagaatgcagtggcgtgatctcagctcactgcaaccaccacctcccaagttcaagtgattctcctgcctcagcctcccaagtagctgagattacaggtgcctgctaccatgcatggctaatttttgtatttttggtagagacggggttttgccacgttggccaggctggtctcaaactcctgacctcagctgatccgcccacctcagcctcccaaagtgctgagattacaggcgtgagccactgcgcccagccaacatagtataatgttttcaaggtttgtctgtgtcgtagcatgtatctgtacttcattcttttttatgccagaatagtatttcatggtatggatatggcatcttgtatttatcctttcatcagttgatggacttttgggttatttcccctttttggctattataaataatatgctataaacatttgtgtgtaagtttttattgtttttatttctcttatatataagcctagaaatggagttgttgggttatatggtatgtttagccatttgagggactaccagacttttccaaagtggctgcaccatttaacatttccgccagcgatatttgagggtgtccattgccaccatgtacctaccaacacttgttatttttagttttttattacaggcattctagtgggtgttaggtggtttctcatggttttgatttgcatttctctggagacttatgttgagccatttttcatgtacttatgatatacataactgaggtacatgtatttttactaaatatggaattgttagtatttttaatagctagatagctccatttctggatgtgtgtacttctaatcagccagttaatcctgttaatagacctaaatcctttacgtcaactttgcatgcatgtgtcgctatttcctttacaaaaatttccaaggtggatttttgggttctagtaatatctcaaatggaagtattcaatgcaaagtgttatttccaaaattgtttagtcacttaatactgataaaaaagtatgtctattttggaatgcttgcaacttttagatataaaatcatcaatctgactaaaaacttattttttgtatatgttcaattgaatctataaaactgtcactcttccttagtcatataatttatttcctcttctctaatattgattatttatacttgattctttatcaaactaactgggtagcctttccagaatagttaaaatagtgataatcatcctgttcatcttcgatattgctcttgactttagagaatgtacttttatagtttcatagaacttttttttcttcattcctagaacttctgtaggatgtatttaattttttaaaatgaggtaaaattcacaagacataaaattaatcattttaaagtcaacagtgcaatcgttcttagtacagtcacagtgttgtacaaccaccacttgcagccacttcacattctcccctccagtagaccctggcaaccaactatgtgctttccgtctctttttgtagagtgcccgattctgtcgctgtttggggcgccagttgtaactgaccatgattcctggtagactgaacaaagcggggcaaacgagggaataaaagacaaaaacaaaagagtatatttggaagaaggggtcagggggcaccttgcctctagtggataagggctctgagctttacacagctctccgtatttattaggcaaaagagatagagagaagggggggtgattgtcgagtaattgtcagtcggccttttggttcacagcaggcttgtgagattgcattccttgagcaatagcctctagatgtccccatagatagcctccaggagcccagcgccagggaatggtggccctcagcaaagctggggcaggtacagaagcgagtttgcccacattctgtactcgtgataaacagtttgctgtttgatcatgtactctccagtggaatgctgagttggtcacgatccctttggccttttcggctcccaacatcttttttttttttttttttttttttgagacagagtttcactcttgttgccctggctagagtgcaatggcttgatctcagctcactgcagcctctgcctcccgggttcaagcaattctcctgcctctgctaggattacgggcatgcgccaccatgcctggctaattttgtattttttgtagagaccgggtttctccatgttggtcgggctagtctcgaactcccgatctcaggtgatctgcccgcctcggcctcccaaagtcctgggattacaggcgtgagccaccgcaccaggccagtgtgctgtctgtatgcatttacctaatctgggtattttatataaatgaaatcatataacgtgacatttagtgtctgacattttctttttttttttgagacagggtctcactctattgcccaggctggagcgcattggcacactcttggctcactgcaaactctgcctcctgggctcaagcaattctcatacctcagccaccctaacagctgggattataggcatgcaccaccatgcctggctaatttttgaactttttgtagagatggggtttcctcatgttgccctggctggtcaagagtttatcttgagctcaaagcaatcctcctgccttggcctcccaaagtgctaggattacaggtgtgagccaccacgcctgagtgtctgacattttcacttagcataatgtttttgtggttgtggattgtgtgctgggctactcctttaatgattagccagggaatctataaacctgccttaccgttcacttcctgcttgcactgaacctgtagacatcagccagaaggaacgttttagagtcttcttaggtcttttctcagccaacatcctcccctgtgcatgcgtgtggcttttatatattcctcagtctatacgagtgcttttgaatggtataatttcctcaagacactttcctcctacctttttctcacaacctttcctctgtgactcaagtgtaatcttttgccccaggcagctgaaggttgttgttctgcttcacaaagtgtttgagaaatgcccattacttttcctccctgagtgaattccaaaacaggaaggggcctgttgcataggtccttcaggtagttagaatagacaacaaacaatttttttatttttatttttgagacagggtctcactctgtcacctaggctggagtacagtgacgagatcatggctcaccacagactcaaactcctgggctcaagtgatcctcccacctcagcctcccaaagtgctggtattacaggcatgagccactgcactcagctaaacaaaattatttgtgaataaagtctattctgttccctccagggcctgaatccaggttcccacgttgggaatgttggccacaatctttaagaccatcactgagctggggagggggtggagcaaagacagataaaaatggcacagaactttcctactatttttaagtcaccattttgttgttgttgttcttgtttgttttgtttctttgagatggagtctagctctgtcacccagactggagtgcagtggtgtgatctcagctcactgcaacctccacctgccaggttcaaatgattctcctgcctcagcctcttgagtagctgggactacagacatgtgccaccacacctggctactttttgtagttttagtagagatggggtttcaccatgttggcctggctggtcttgaacttctggcctcaagtgatcctctggcctcagcctcccaaagtgctgggattataggcaagcatgagccaccatgcccggccagtcaccttttttttgactcaatatttgttctgttgttgtaaacctttgactatttttcagagttctgaccaagtttttgttttttgattgtttttacttgattttttgatagtttttttacttgagtttttgatttttcgatagagggacggacccttggacctacctactctgccatttttactcaatgagattttcctccacagtatatatgcttttgttttttttgttgttggtacttttaaaaaagaaataaactgatgcaagtgcaccttcagtgatatcctctaatccaccccctttcctctcctccatccctagggataactattcccttgaactaatttcatataatgcatgttttattaaatgtgtacatattgaaaaataatacatagtcttattttatgttttttaattttttaaatatacttttctttgttgtttctttcatatgatgatgatttgtgaacacgtcctgtttggtagtgatgctttagaatttatggaaattttctttatggcttcctatacatacatgagttttcaggaaatatactcctccagggaaaggacttagccactggagcaaacaggcgtgattacattctccagaaagctcataagggtcaaaaatgaagtagaagctcttcagctattcctgggaaaggggctgtggaagctcatgggaaaggaagccttgctgtttgaaatacacaccctggatgtcactgaaatgttgcatccaccacctcctgcccaggaatgttagatcatttgggttctgcacctttccactagtggcgttctaagaagaaaagtgtgaaacatctcttgccacaattacgtgcttctgagattgcagagggaaggggagcatttgcagctgtgggttaaaggatgagtcagtgcagaccctgtgggtttggagcatgcaggagggccaccgggagcttgtcacaatgattccacccaggtggaaggaaagcttagggtgactccatccagttgatgctctcaccatgtgagcctcttacttgagttttagaattgggcataaaaaaagcctctggggccgccactctctgacctgctgctttcaggccaagggtgtagcgtgcagtttttccatttgtctttgtgcctgtgtcactgttggcagtgctgatttcagaaggtcagattatatgtctatgacagtggccatcttccatgatgaatgaaactccctcaaggtagtagcaaagagagctaagatgtatgatgatggtatgcagtccaaaggtattcagcagaggctaaggtcatgttcttggagacaggctgtgtgggttcagattctacttctgcttttggacaatatagtcaaatctgtaagccttaggtcaatgttggaatgggaaataatgattgatactttataaggatgtaacgcagaaggtagtaatgagaattcaaatacaacaacccctctgcttggcttaatacatttgtcttcaaactgaggcatgcctacatgtgaggtgtatgatgacttttgaccaggcatgtggacacacgtggttttaaagaaataaatatccaattcctcaccttctctgtcctttttctaaaacctgatctaagaagtttcttggtgttgcagcatcatgttggtgctggttctcctttcccatctcccctctcacagtcacctcacttacatttcacagaagaaagacagtttgtaaatgtattggccatacctgtagaatcttatgttttgttgctccaggatttgttgttgccccagggtgggttaaaacttctggggccccaaataaagggacagttagagatggccttgcattaaggtgagaacacagcagcagtgacagcacctgggcctgcagggaatgtacactcaaatcaatttactcttcagcccacaggtcctgacttcaggagcaagacacttcaagtgaggtgaggaggaggttccaggacctggataccatcctttgcagggatgtaattcaccagagaccaagatttctagccagaaattgagggcagctcaaggagagactacagacacagcatcctacttactggctatttcccagtaacaaaagaaaatgatcaagtcccaggtgactttttgtttgttttagtctttccttcatcacatgattgatttctggaagactttaaaagtcagttgaattaagtcaaaaagtataatttggtaaactaggatttgtgcatcagtaaatttagattgtaatttcaacatctaggcaaagtaggatcaggactatattgtttacatgtggtatcatagaaagatacttggtctttgtctggcatagagctcctaaaacccttggaatttcctgaatgataagggtcttttttttgtttgagacagggtctcactttgtcacccaggctggagtgcagtggtgcaatcttggctcactgcaacctcggcctcctgggctcaagcgatcatcccatctcagcctcctaactagctgggagtgtgtgccaccaggcccagctaactttttgtatttttttgtagagatggggtttcaccatgttgcacaggctggtctctaactcctgagctgaagcaatctgtctcccttggcctcccaaagttctgggactacagttgtgagccactatgcctggtcctctttttttgtagtgaaactactctcagtggacccctaggtagcttcagtatggaggctggttgccagaaataacaagccttgattagaagcttggaactttcagtactacctctaatctccagggagcagagagaggctggagattgagttcagtcaccagtggccaatgatttattcaaccatgcctgtgtaacataaaaacccctaaacagcagggtttggagagctgggttggtaaacacattgaggtgctgggaggttggtgtgtgcagagagagcatggaaatttatgcccatacaccaccatactgtgccctgtgcagcttttccattgggttattcctgggttgtaaataaaccagtaatagtaaagtgctttcctgagctctgtgagttgttctagtagattattgaacctcaaggtgggttgcagaaatccccacatttgtagccaagggacaaaagtctttgtaacctggggacctcacacttgtgactggtgtctgaagtgaggttggtcttgtgggattgaaaccttaacctatgggtcttccaggagttggtgtcagaattgaatctaatcgttggacacctattgggtgttagagaattggagaattggttgatgtgagcaaaaacccacacatttggtgtcagaaatgtgagtaaaaacagcacaatggaattcacacaaaatgactaatgttggaacctaatgtgtgaccggagcatcctgtgggttatagtagctgtcaccttctgtctaatgtctctgactgtcatcacatccagagagtccttggtcacaggatatgcactgactctcaggagaaagcagaccagttcccgagaggtgtcactattaaatgcacttaggtcccaggacagtttttagatggttcttcctagaggtggtgtgacagatgatgtcttttttcttttttttttttttttttttttgagatagagtctcactctgtcatccagattggagtgcagtagtgccatcttggcctaccacaacctctgcctcccaggctgaagtgattctcctgcctcagcctcccgagtagctgagattacaggcatgcactacgactgcccggctaatttttgtatttttagtagagacagggtttcaccatgttggccaggctggtcttgaactcctgacctcaaatgatcctcccacctcggcctcccaaagtgttgagattacaggcatgagccaccacgcctggccccgaatataaatgccataagcccagccttctcatacatgccaaagcacaggtcctcagagacctttttgggaagaggccaaaggaactcagaggacacagttcaggggtccaaggcaaggttacccaaggacccagtcttatggctggtagggtcatccaggaataaaacctgaaaggctgaggaaaatggaaagattgcacaactttctttttttattctttttctaaatttttttttcatttttcttctttttcttttcttttgagtttcacattgtcacccaggctggagtgcagtggtgtgaacatggctcactgcaacctcgatttcctgggctcaagagatccttctgcttcagcccctcaagtagctaggcatgtgccaccacatccagctgatggttgtattttttgtagagatggggttttgccatgttgcccaggctgggattgcatgactttctaaggttctctgtatgaacaggtggctgacttactgtttgagacaggattggcagtagggagttgaaagtactgttgtctggtaagggaatgggttgttgggatccagagggtttgctttacaacatccccctgtgtaagattgtgcacattctttttccatgttcaaagccagttcttacaccctcatcctttaatacgttaaaaaaagtaagtatataaatgtacatggatatatatatatatatatatatatatgtgcaatatgctgtataggtttatagtctgggagcaataggctataccgtagagcctgggcatgtagtaggctgtatcatctaggtttaagtaagtgcactctgtgatggatgaacaacagaattgcctaatgatgcatttctcagaatgtatccttgttattaaatgacacatgaataaataaatatacatgtatacatgtttgcatatatttgtatgtatgtatatatatgtatatatatttacagacgtatctgccttagcccttagatctttggatagtacctttccattattgtattttctctttcacaaactaaattggtacatgctagaccttacctatcctctgtatttattaatctggtcttttatatattgcatcattctgtccttttgttgcatttttggtagttttttcagatctacttaccagttcattgactatctcttcagttatgctgcttacacgcctgataacataaatataaatacttcaaaacccatatgtgtgtgtatggtttttgaataatattttgtattttcttttttattatttatttatttattttatttttatttatgtatttattttgagatgaagtctcgctctgtcactcaggctggagtacagtagcatgatcttggctcactgcaacctttgcctcctgggttcaagtgattctcctgcctcagtctcccgagtagctgggattacaggcatgcaccaccatgcctggctaatttttgtatttttagtaaagatagggatttcaccatgttgggcaagctggtctcaaactcctgacctcaggtgatccgcccgcctaggcctcccaaagtgctgggattacaggtgtgagccaccatgcctggcctatttatttattttgtaagccagtcacatttagcagtagggggtaataatacttaattgtctcttgttctttggacatgttttggaaagagtcttttactcctcctaacatataaaatatacttatttattatgtagtatcttgtagtgtttggggtttcttcctggttgattctggtagcgcacatgaagattcattgaagattcatgatgaataaagaagtatgctttattcatcctgatattgctaaaatatatttagtgcctggcaaataggtgctcaaaaaaaaaaagaggattagcaagaggattaaatgattggttcttatagaaacttctgatttgttaaatgatagataattacacaattacagaatattttgctagagatagattttgaatatagatagattttggagatggatttttgcctctatgacaatgtatttttttaaaaatcacagcacctagatatatagatgcagactatttggtaaaaatgagcagaacaatgttcttcacatttcttccatataaatgagagaaatacttcatattaagcaggactctcttattacaggaatcactgaccctggaggatgtggctgtggagttcacttgggaggagtggcagctcctcggccctgctcagaaggacctgtaccgagacgtgatgttggagaactatagcaacctcgtgtcagtgggtgaggacagctgccctgtgtcactcagagagtacccagtcaaaggcctttgctttctcagctttcaaaagctctggagggcctgtggtgctctgaagtggtagattctgtaccctctctggccccagataaaagagtgtaatgtgccccctttagagggaaaatccctttgctttgcagacacataaattacatagttcctaaaacagaacatggtcccatgttgatagaccacagctcaattcaatgagcctaagttgtgtatcatttcctatgaacagggtatcaagccagcaaaccagatgcactcttcaagttggaacaaggagagccatggacagtagaaaatgaaatccacagccaaatctgtccaggtgagttcagggtgagagccagcaaggagggtggctgagcaagtcacatgatagttgttcagcagtgtctgagctgtcagggcatctgaggctgtgtggacagagcctccatgtatccctctccccacacaaaagctctttctccttcgggtatttagaggaacatctgcttcgttatcgcgtcttggatttcatcactgtttattttttatttattttattttatttatttattttttgagatggagtctcactctgtcacccaggctagagcccagtggtgcaatcttggctcactgcatcctctacctcccagttcaagcgattctcctgcctctgtcttcccagtagctgggatcacaggcacccgccactacgcccagctaatttttttgtattttcagtggagacggggtttcaccaagttgaccaagatggtctcaaactcctgacctctggtgatccacctgctttggcctcccaaagtgctgggattacaggtgtgagccaccacacccggcctcatcactctttatttaatctaggtttgatttgtttttctcaaggtttcttcctttttaggattctcaaatctcatcatttcttgttcccccatcagagcatcactacctgttccttctacttctcttgctatgaaattcctccttccatgtctgtctccaaagagtggtcttggatatcagcactctctcctgaccactatacctttctgcccctttagataatgttgattttttttttccaaaggtcttcccaccctatcttggactctgtgcccccttagtaacctggtctgttgctttgcatatatttgcttccttagcttctcttttttctcccactctgaggtcctccagaggttctgtttcccatttattttgctctgttctcatatcctttaaaagtttccttcattctaatgacttaagttcttgttctctatggagattctcagattgacatctcccttaatatttcctaacttacatgtttgtacctattttttacccacttgcatgtcaactccttgagtcgatcctggccaccacagggttaccttgaaacttccctgcctcctcagctaccgtatttaaagtctttgctctttcaattgatttttgaagtagtctcattctctttccaacccaaaccagattactacacctcatgcctgctttgcttcaatttccttttggaatcattaattctgcctattatttagtttctcttaaattatattgctggacttattcccttaaagcttttctgttcttaccatagtctgatggcactgagtcccagtgaatcatagcagtcatataagatggaaatttctcatctgtcaggtgatattctagttgaatcaccatgatatggtatcatcttgcctacacagagtttgttttccttttccttttcataaattcaaagccaactatatataaagcactacatttgaagtagtttccgcagtgtgtcccttactttccttgtttcattgccttaaatattttttgatagactattacatatgggccctgacagctgtgaacatcaataacaacaacaaaattcttcttggagattacctgctaaaaggaagaggcacaaaattaatcaaaatggataaatgtcttgtggtgaaaaatgctgggaagaccaataacaaagtataatgagggatgccgggagtgggaatggctgtttggtcagatgcctttgagcagctgtatgacagacatgaatacgtccccctggtgaattaccttccaagtagacaaaatagcaggtccaaaggcccaaggcaggtgtgtgtttgaggaacttcaaggaagcctgtgtgaatacagaggagtgaacaagaggggcagtggtcggagataatacggaagtaaggacagtgtggtgggatctggagtttggggtagacaggtcatgtatgacctttcaaggacattttaatgacttgatttttttttttttttttggcacagagtctctctctgtctccaggctggagtgcagtgctgtgatctcagctcactgcaacctctgcctccctggttcaagcgattctcctgcttcagcctcccaagtcgctgggactacaggcgtaagccaccgctcctggctactttttgtatttttagtagagacagagtttcaccatgttggccaggatggtcttgatctcctgacctcatgatccacgtgcctcggcctcccaaagtgctgggattacaggcgtgagccactgcatccggccatgacttgattttttaaaaaattatgagatgaggaaacatgagggagttttgagtagaagagtgacatgatgtcatttatatttaaaaggatcactttgactactttgtagaaagtatacaggagaaggcagaggttgaagcctgaagtccacttgggaggctattgctatagtaccagaaagagtgattctcttccatctaggtagaaggggtgagtgttagtgagtttcagaatacaggagtcccctgttatccacagtttctctttctacagtttcagctacctgtggtcaactatggtctgaaaatgttaaatgggaaattctagaaataaacaattcttaattacattgctcaccattccaaggagcatgaaatcttgcaccatcttgctccatcctggaacaggaatcattttttgtccagcatatgcatgctgtgtaccctacccacctgtgtcacttagtagccatcttggttatcagatcaactgtcaaggtatcacagtgcttgtgttcaagtaacctttgttttacttaataatgcttccaaagctcaagagtgtgatgctggcctattgttataattcttctattttattatttgttattgttaatctcttgctgtgcctagtttgtaaactttattataggtatgtatgcactgtacaggaaaaaacataatggatatagggttaagtatgattcagagtttcaggcatccatggtgtggggggtgtcttggaacatatcgcccatagatgagggattactgtatatttataaaagacataaggaatttactactgaagtagacaaagggtgtgagacaaacatacaaatgaaagatgatagtaaggtttctggcatgagtccgagcaggaattaacttgccatttcctgagaaatttaccttgtttatacactgactgcttttattttttgttttctttgtttaaattataatggtttattcttgtccaagtgacaataggcatatctacttggagttttttaaacagtggaaatagtgtggtcagtagagccagcctgtacaagactgtttgtgaaatagttctattccatgctcatggaaagatttattgttctcttctttcctagaaatcaagaaagttgacaatcatctacagatgcactcacaaaagcaaagatgtctgaagagagtggaacaatgccataaacataatgcatttggaaacatcattcatcagaggaaaagtgattttcctttaaggcaaaatcatgatacatttgacttacatgggaaaatactgaaatcaaatttaagtttagtcaaccagaacaaaaggtatgaaatcaagaattctgtgggggttaatggagatgggaaatccttccttcatgccaagcatgaacaatttcataatgaaatgaacttccccgaaggtggaaattctgtgaatacaaattcacaattcattaagcatcagcgaactcaaaacatagataaaccccatgtatgcactgagtgtgggaaggctttcctcaagaagtctcgcctcatctatcatcagagagttcacactggggagaaacctcatggatgcagtatatgtgggaaagccttctccagaaagtccgggctcactgaacaccagagaaaccacacaggagagaaaccctatgaatgcactgaatgtgacaaagcattccgctggaaatcacagctcaatgcacaccagaaaattcatacaggagagaagtcatatatatgcagtgattgtggaaaaggcttcatcaagaagtctcggctcattaatcatcagagagttcatacaggagagaaaccacatggatgcagcctgtgtgggaaggccttctccaaaaggtccaggctcactgaacaccagagaactcatacaggagagaaaccctatgaatgcactgaatgtgacaaagcattccgctggaaatcacagctcaatgcacatcagaaagctcacacaggagagaagtcatatatatgccgtgattgtggaaaaggcttcattcagaagggaaatctcattgtacatcagcgaattcatactggagaaaaaccctatatatgcaatgaatgtggaaaaggcttcatccaaaagggcaacctccttattcatcgacgtactcacactggagagaaaccctatgtatgcaatgaatgtgggaaaggcttcagccagaagacatgtttaatatcccatcagagatttcacacaggaaagacaccctttgtatgtactgagtgtggaaaatcctgctcacacaagtcaggtctcattaaccaccagagaattcacacaggagagaaaccctatacatgcagtgactgtgggaaagctttcagagataaatcatgtctcaacagacatcggagaactcatacaggggagagaccgtatggatgctctgattgtgggaaagctttctcccacttgtcatgccttgtttatcataagggaatgctgcatgcaagagagaaatgtgtaggttcagtcaaattggaaaatccttgctcagagagtcatagcttatcacatacacgtgatctcatacaggataaagactctgttaacatggtgactctgcagatgccttctgtggcagctcagacctcattaactaacagtgcgttccaagcagagagcaaagtagccattgtgagccagcctgttgccagaagttcagtctcagcagatagtagaatttgcacagaataaaaaccatatgaatgcagtgaatgtggtagtgctttcagtgatcaattacatcatatgtcacaaaaaacacagaggaacaaactgatatattcaaggtggaaagcccttgaataaaaccttatggctaataagcatatactcagagaaaaatagtatgaagtggagactgggaaattcttttatgggaagatagatcttctcatcagtgaccatagatcacatcttcagtgagcttatagttggtagaaatataatgatcatggaaaagtccttgttcagaaacagtacgccagtaggtatcagggggtttacacaggagagaaacttttggaagacctttgaaggctatgaatgtggcagggttgctagtggtacattctgccttatcctcagagggaatcatatagaaataaaactatgaaaatgtaactagaacatcttcatcaaaatatgaaagaacacacgaagcaaataagccctgtgaaaaggagtattttagagatttcgatcagaaatctaacatcattatatggcagataatatacaggatgtgtattttaggacaatataccttgaatcactagttgatatgtcaatgactaattaaaaggggttgtcagtgttacacatcattggttaaatttatagcacaatgtacctcttcccccttttttgataagagtcttctattcccaaccaagatcattatatgattagctcttgtgtttctttgattccaaatttcttcacttgttatttcagactactgaagctcttcaaaaggaaaaatgtatttaatttaataatgtaacacaacaagtttggatgtgtttaactttataaataatcaccccagaggaatgaagttcaaaacttgtgaataaccaattggccatgctcttaatttagaaggtagtcctcatcctaaccctgtggtttgtcttattgttggcataagcaccattcagaatagtttgaatgatctattttctttacctgaaactatttcctttatctaggaaccgtggatgatggcagtgggaaacaaagcaaaattgcaagccagcatttttaaaaagctggattatatgcatgtagctattttaccctccagcagctgtagttaaaaaatgcatatgcctatatcagttgaaagagacatacaatataagatcaaattgtcctgataatttcttattcaagggacatatttggagtgggaaggggaaaggactcaattttccttacataaaacaggatatgaatacttttctaaaaagtgttcatgtcttctctctacctaaattataaattccttgatagtttgtaggcaattgtatataccctagcagataccaaaatagaaattaattatatgtagatttggaagatgaatgaaggtgcatgaataacccagtggacaattatcaaaattacttttgccattgaaggaaaggaactactggcaagaacttctaaggattagtattattctaaaaaaaactttaaaaaaatctgaatagagactcatttctgtcataagaggggcagaagagagaaggaataggattcacagaataagcccaataaaagaacaaaataacttcattctctaaaaataaaggacagcatgtaagatgggtaaaggtgagatccttttggatatcttggataagaacccttaaatttatctacagacctgtcaccttggagagctgctactgttttaaagatcctggctcctctgtggtatgctgaattggaacataagatttctcttcatcattccttctcacttggggttaagacccttgtcctctcctatactcagagttccttcccttgatctaataaagatacatccatgttagaaacagtcctgctcacaaggaaaaataaagtggaaatttgccataaagtggctgcctcacagtggaaacccgaagtctgggttatcgggtgattacaacaaatagtttttgagcatctgcactgtggtagacacttgtacacacaggatacactgaagaacaaacataaagtagtggcctgtaacaggatggattcagtacagatgctctacagttaagagtataagaaatgaactcttcttcaacctggacttcagattctctctacttcttgccttgtgaatctgcacatcctatcatagcagtcgtagcatcttactccctgaacacataaatcagggtgcgctactgggcttcccaggcctgtccttgggaccaggtgttgaaatcacctttcagaagttggcatcccagctaaataaatttaactggatactcagttccaggttgcctctttcaaaaggcacatcaccccatgccttcataaaaatggtagccgacatttattaagcatgcggtttgccaaatggtaactgcattatttagtaatttaaaaaaattaaagtttgtttttgtttttgttgtgtttgagacagggtcgtgctctgtcgcccaggctggagtgcagtggcctgatcatggcttactgaagtctggacctcctgggctaaagccatcctcccacctcagcctccagagtggccgggactacaggtgcatgccaccacactctgctaatttttgtatttttgtattttttctgtaaaggcagtgtttcactatatttcccaggctggtctccaactcctgggcataagtgatcctcctgacttagcctcccaaattgctgagattacatgtttgagccatggcacccggcctctttagttatttaacactcttatatgctccatttccatcttcaagtgtttcagggaaatatttgattaaatttgaggcctcattcctttttccttattacaggtaaccacacactgtatgcagttgcacgtgggcattggtcctcatagagatcgctcccgtatttggcctcaagacaattctcggctagactagccttgcccattcttttctgcatccgttgaaggagattcagaacatccacaaatttggtccactctgtgaccgctgtccccctattccccttcagccacttcgcctttggcacaccttgttggtcctgaagaggccctcagaaatactccacattccgccctaaactcccaacagattgtattttctactgaatggaaactgacacctcctaagatgaactgcagccacgatgcttcttcctaacggctcaatatggggtacagcgcgcggccatcttatttttttgctcaggctgttaaaagtttttataattttctgacaatttatccagtttgcgcagtgactgaggtgccctgaaattaattcactgtcttccaacgccgtggtaacagcccttccgggttctctggtgggagtcgccgagatgggcgtggccatgatacgtcacaatacgaggccgagggaggaattctgtcgtctgggaacggctggtttcgcggtcagacgccgagggccctcgaagtccctagcaacggctgcggagggagatgtaagtcgttttggacgcaggctcagtgtttggtcccagcgttcggtggagtccggagagactcaggatcagatgagtcggggtctggatgtggctccaagtgaaaggcctgtgggggtcagtgaaggggagccccctgttctgagaccgtgtgggaccccgcgtcctggggttctttctgggtttactcaatggagaagcctggctttggtgatagggcgcctggcggtcagtaattaagagactggaagatattaacgaccgactgtcaaggtttatggtcgttgagggaatgccgtgggaatcagtggttgagaaacggggtaggaaagtgtgtatcagtgaatgaacttggtgtccattccgggtttgcaatttaatgtgatagagaagcttggggctggagaatgttttagtgaaagaggttttagtttgcggtttcagatttaatttggagtcaatgtttgaggaggcctgtacatgtctgtggtttaggggcctgaagaggctggagctttggaggcccaagggccctggagagtggatgggttgaggcttaataattgactgctggttacagttgtgattaaactacatttacctagtggatctacatgcagttcagttcttcaagtccaagtccgtcttaaaaataacaatgaaaaacatttcccttcctatattcatatcattgtctacaaatttctggacgaggaaattacgagtttgctactaaagtcgagcttttttcctctctagttcccaactttaccatgtcgttttcataaatattttctttcagatttattccaacacaagaaaataatctctgttacccacacttctgatttttatttaggagcattttttttttcgtttcatcctcacagttttcacaattgcaatactttgggtaaatatttgatttcatcacttaaattctcatcacaaacatacatacatgtatgtatatatagtatatatatctatatttctgtctctatatacatctgtctatgtatgtatgtatgtatctatctatctatctatctatctatctatctatctatctatctatctatctttctatacagagagagtcagtcttgccctgtctcccaggctggagtacaatggtgccatcagctcactctaaccttgaactcctgggtttaagggatcctcctgcctcagcctcccaagtagctggactacatataaaatttttcaatggcagtatcacatcagaaggttgtaccagtggcttagtaaatggagtcacattaaatgtttgccttaattaggatggaattgacatgtataaaatattcaattctatttctatattttctatctatatataacattctgatactccaattactcaagttcttctgttcccaccccaagatttgtgattcacttttttatgtcctagatcttatggttacatttattcttaagtggcttatactgttttttttgataattcctctagaagaggaagtcattttttaaaaattgagacagagtctcacaccgttgcccaggctagagtgcagtagtatgatcttggctcactgcaacctccgcctcccagactcaagggattctcccacttcagtagctgggactacaggcactcgccaccatgcccagctaatttttgtattttttgtagaaatgaggtttcaccatgttgcccaggctggtcttgaactcctgagcccaagtgatccacctgatgcattacctgcctcggactccaaagtgctaggattacaggcgtgagcgactgctcctagccaagcgtttcttaaatccaaatatttgctggagtatgcgtacctaatgcatgtatgaaggcctatccctctgagagtctgggttgatagatttggagtacaatccctgcagagtgttgataaaattctctatggaatgctgttgtgacatacttggtaactcacagccctaatatatgctaaaatggatggaattttgtgagaaacaagaaaatatcttctagtagtgatgattttttgtaacaaatatatgaaatatctgtatgtaatacaggatttaaacacaaggtattgttagaattctaggttgtgtgaagttacatgtcaagatgttactgaaatgccaagggttcagtctaggtcccgttgcttgccacacagaaagacaatcactgagacaatgagtattgcgagagaagaaaggcttttttgggtaacatcaggtgggagaggaaaataaatatcaaatctgtctccccacaaccgactaaaattggtggcttatataacaggcaaggaatataaaacaggaattagggaagggtaaggaagaggagttggccaacaggaatcaggtggtcggttaggcaatcatgatggatgaggggtccaccatcgcattgtctagatgcagtgatctggtaagtttcagttccttgaactatctgggaggcctgaatggtttcatgagaaacgaactcagataaaatgaatataagtttcaagctttaagactaggagagtcaatttctatatttattcaaaaagactgttaacatcatttctgtggggaaatccagccagtttaaaaaatgatcagcaaagatagggaatatggtagaaatgtaaaggaaatagaggttaaagtgatatatagagcatagggaatgatggcatgatatgtaaaaggcatgtctaaattttgaataaacataatgaagggcagagaatgaagggattaaatggaaaatttgtcaggccatgagggagaatgccaaaagatttggtccgaagccaaccatatgaaagccaatgttagaaggtgtctgtaggggaagtagtagaatagaaatgtggataagtggggtaatcatagcaacattaacttttattgccaggccgagtggattttgtgttagtaattgaggtagcatggtagagggtaggtttcttttgtatttttctagcctatgggtagtcttatctttcacccagtgacagcaatgatgcaataataaggaacagccagagtttcatatataaataaatatataaattatatatatatatcttttgagatggaatcttgctctttcacccaggctagagtgcaatggtgtgatctcagctcactgcaacctccacctcctgggttcaagcaattctcccaccccagcctccctagtagctgggattacaggcgcccaccaccatgcccagctaattttttgtatttttagtagagatggggcttcaccatgttggccaggttggtctcgaactccagacctcaggtgatccacccgcctcagcctcctaaagtgctgggattacaggcgtgaaccaccaccttacattctggctggggaaaacaaaataaaaacacaaggaaactaaaaaatgaggtagctgcaaattatgagagaaaacacacactgcctatatccaatcagggaaataagcagacacacttgttttaaacaaatatcttgggagaggcaagtcagaatgtcagatttcgacttcaacgtatctgtgacactcttagatggtcatcctgtttttaaaatgcatcccttagggaggtgggggggtcagccccccgcccggccagccgccccgtccgggagatgaggggcgcctctgcccagccgcccctactgggaagtgaggagcccctctgcccggccagccgccccatccgggagggaggtgggggggtcagccccccgcccggccagccgccccgtccgggagggaggtgggggggtcagccccccgcccggccagccgccccgtccgggaggtgaggggcgcctctgcctggccgcccctactgggaagtgaggagcccctctgcccggccaccaccccgtctgggaggtgtacctaacagctcattgagaacgggccatgatgacaatggcggttttgtggaatagaaaggggggaaaggtggggaaaagattgagaaatcggatggttgcggtgtctgtgtagaaagaggtagacatgggagacttttcattttgctctgtactaagaaaaattcttatcctgttgatctgtgaccttacccccaaccctgtgctctctgaaacatgtgctgtgtccactcagggttaaatggattaagggcggtgcaagatgtgctttgttgaacagatgcttgaaggcagcatgctcgttaagagtcatcaccactccctaatctcaagtacccagggacacaaacactgcagaaggccgcagggtcctctgcctaggaaaaccagagacctttgttcacttgtttatctgctgaccttccctccactattgtcctatgaccctgccaaatccccctctgcgagaaacacccaagaatgaacaataaaaaaaaataaaaataaaaataaaatgcatcccttttcttcattctgtatcatcaaactaattttcccaaagcaccaatctcacatttagagagaaacttattctcagtgtccaacctttagcctcactgtgggcacattctcctgtgcttctaaagaaagagggaaagatgagaaacaatgatcatttggaaagtttgcaacaggccaatgaaccatgtagacctctccagaagcagatgtgcttctgaataggataagatgtgttactgaatgggtgctactgctggtgcccacatgtgttgtctgtcaccttcagtcacatttggcatgtagtacctacacagatgtcagatctgaatttttcccatttcattgtccctaatacactgatcccttgtcatgtaactaatagcatcttctataattctacaattatgtcttggttggcatcacaaaaggggcctaagggaccaccttattccttttaaaccaagactcatgccacctttacatatttcttagaaaggaggatatataatggaggaagacaaggctcaccgatgagttcaaaacaaggggacgaagaaagtgaggaattaaggtttgctcctaagtattttgcttgagtcaagagactttttttttgaaagatatatttaacattttacattatgtatataatagtcaaaaagtcttttatctcagtcaatgaatattttatttcagtgaaagggtcttatatatcggggacatctggcctgggatctaggaaacatggaaggaaattaatctgtaataaagtgttagtaattaagaggtcaagctctatgactcagtctccaaagtcaactttcctcaagtcctaataacttttagacgcccccaatatacagactattttcttttaggctcaactttctttacataagacatgtgaatccacacgtctatgccttctacattttagtgcaaggattagtaaaaagtaactaatagagcgctttccagtttggttaaagggagtcctttaaccaaatatcattttagatatcatttccagtagaaaaaaatctcctggctgaagttcatgggttttaagttctttgtttcctgggagttcactataaaaagagtcttttttcaaattatgatttttaggtagttgttttataaagatgtcagaaaaatttaatatgtcttcttttagcattatggatttatactttcctggggatagtttcatgcatctacctgttattatctcaattagggaaaactgatgtctaccaaaaggggtggattttaggttaaggaaaaccagtggaagggcccttggccaagacatgtgaaaagcctgggttaattttgccaattgaattttaattattttgtttatgcattctactaatgcagatgactgagggggatatgcagaatggaagtgttaaagaattggccatattttacgtagtgactgaattacatgggcagtgaaatgagtacctctgcccctatgaagttctagagagactcctcaagtctaaataatttttcaaggagaattttacttaatgttagggctgttgctcttctgcatggaaatgcttctacccaatgaaactatacagactttcattactagaacatacttgtatccttgtgatggggtagtcgaataaaatctgccacacctcaaagggggcctcaggtaaagaaaaatgttcttaggaactatgtaaaggtttccctggattatattttgggcaaatatggcagcaactaaatgctttatgagctatagttgaagaaacttttcaaaatactatttttctcaataaccactttatcagggctccggtgaattaaatcagtccgtagggttgaaaatgatgattgtaattcagtaggaagtataggcaagttgtttagtccacaccatatttcacctttttgttttatattttctaattctgtttttagagctctggattgggttaatttatgtcaaatttgggggcttctttcaaagttaatatgaattgtttttattgcctagatgtatttaggcagtcctcattgtaaccttatgagctagctgacttccttcactttctggagtatctgatttggaattttttggagtatctgatttggattttaataataggtagtgagttttataataatgtttttttaataataaagagataaggtatccattttttatggactggccggaagaggttcaagaccctctttatttattttcacagtattacaaagtcacgaatgacttcaaaggtatatctgttgcctgtatataaattagcagttgttcattttgccaactgacaagctctaattagtgctgtcaatttggcttgttcagcagagattgcttctagaagataagcactttctattttttcccttgggatattataacataacctgcttgtaaatttgagattaatctttaagtaagatctgtctgtaaatcaaaccacaccagtgttactaagatgagtttcttgcaggtttgtcctaggagagaaaagctgaccagttaaggttatgcaatcatgaggcatttcatccaaatttagggggagaagagtagcagaatttaggttattacatgtagacattgtcatatgaggtccagaaagaagtaagacttctaaagggactagcttgctaactaagtaattctgagcatgaagtgaatttagaagtgcttccaggctggcatgctggctcatgcctgtaattctagcactttgggaggccaaggtgggtagattccttgaactcagaagttcaagaccagcctgggcaacatggtgaaaccccatctctacttaaaatacaaaaattagtcaggggtggtggcaggcacctatagtccctgctactcagaggctgaggtgggaggatggcttgagcccaggaggcggaggttgcagtgagccaaaatcacaccactgcagtccagcctgggcaatagagccagaccctgtctcaaaaaaaaaaaaaaaaaaaaaaaagattatgcaatcacgaggcatttcattcaaatttaggggcagtttcatatgaggtgaagaaagaagtaggacttctaaagggaccagcctgctaactaaatatttctgagtatggagtgaatttagaagtgcttccaggctgggtgtggttgcttatgcctataatcctagcacattgcgaggctgaggcaagaggctctcttgagctcgggaatttgagaccagcctgggaaacataaggagacacccctgcctccagaaaaaaaatttaaaacttagccaggcatgttggcatgcacctgaagtcccacctaggtaggaggctgaggtgggaagattgcttgagcccaggaggtttaccagtagggtgattgctgtattaaccccatgcaggctggtagtcctctagccactgaatccaactgctgactgttgtattatataggtctcttttgagccccatgtttttgggtcataatgcctagggtattttcttgatcttcctgtacaaacaacgtaaacaaaataatttggatttcctagtactggggcatctataagatcctttaaattgttcctaacattaattgatttttctctgtccaatccagagagtctgcttgtctcattttaaaagggtatagaaaggtaagcttttaatgaaaaattcagaatctaatttctgcaataattttccagttccagaaatcctcttaggtgttttcttagtttttagggtaagcaaggaaaatatttgttttattctatttgcatcaataaaaaggcttttcttggacaatagataactctaaatattttactcattgtagacagaactcaagattttttattggagaccccatgtctctttgaaagcaatttttgtaacaagtgaatcccatctttttgtagcagctttctcatcttctgaacaaagaaggaaatcatccacatattgtattaaagtatagttttcaaaaatgcagcatataagacatttggtttcaatatttctgagaaataagttggactctgagtatattcctgaggcacaatcatccatgtccattgtttgtctttccatgtgaagccagtagtgtgggggaaagcaagagagatcagactattactatatctatgtagaaagaaaaagacgtaacaaactccattttattccgtactaagaaaaattcttctgccttgagatgctgttaatctgtaaccctagccccaaccttgtgcttgcagagacatgtgctgtgttgactcaaggtttaatggatttagggctgtgcaggacgtgctttgttaaaaatgtgtttgaaggtagtatgcttggtaaaagtcatcgccattctccagtctcaagtacccagggacacaatgcattgcagaaggccacagggacctctgccctagaaagcctgggtattgtccaaggtttctctccactgagacagcctgagatatggcctcatgggaagggaaagacctggccatcccccagcctgacacccataaagggtctgggctgaggaggattcgtgaaagaggaagatctctttgcagttgagataagaggaaggcatctgtctcctgctcatccctgggaatggaatatctcagtgtaaaacttgatcatacattctatttactgagataggagaaaactgccttatggctggaggtgagatatgctgggggcaatactgctctttactgcactgagatgcttgtgtaaagtcaaacataaatctggcctacgtgcacatcaaggcacacacagcacctttccttaaacttatttatgacacagagtcctttgctcacgtgttttcctgctgaccctctccccaccattaccctatagtcctgccacatccccctcaccgagattgtaaagatagtgatcaataaatactgaagaaactcagagaccagtgctggcgtgggtcctccatacgctgagtgctggtcctctgggcccactgttctttctctatactttgtctctgtgtcttatttcttttctcagtctctcatcctacctgacgagaaacacccacaggtgtggaggggctggcccccttcagctgtacacaagcaaacaccagattctccattctcaggttccattactctatgctgtacatttgattcttattccgccccttctgaggtatcttgtggtcttatacgctaccaggaatttgcaagtactttcccttcttgtgaagtgtttggcacacaggaaaacatgagggaatattagttactatacttgtcctttcatgaatcatttgaaatgtcacttcttcagacagcattctgggatgcctctcagttttgtcttatttataataatgcaatcattaaatataaaattgcaactcttaagtggggctaaggaagggaactatagaaggcattcaatagggaaatagaggaagcatctctcttccgggaataattgaagatcatttttcctgatcatcatcatctgctcacttaactgctgttcagaatggactgtgagttccacaaaggcagaagtctataatttatttttagccccagtgctcagaacaaaaactggaacacagcacttcaataataagactattgaacaaataaccatatttggctgacaggctacagtctttccttcttcacttaccctcaaggtgctgtgctgctgctcagtgataattaaacatagaaaagatgcagctgggcgcggtgcctcacacctgtagtcccagcactttgggaggccgaggcggtgtatcacgaggtcaggagatagagaccatcctggccaacatggtgaaaccccatctctatgaaaaatacaaaatagttggctgtggtggcacgtgcctgtagtcccagctactcaggagtctgaggcaggagaatcacttgaacctgggaggcggaggttgcagtgagctgagatcgcaccactgcactccagcctggcaacagagcaagactccgtcacaaacaaaacatagaaaagatgcaaaagagtgtatgctgtatgccaccttttgaaaaaaggacaaataaataatatatacttgtattataaaaagaaacactggacggattcacagtaaacatgtttacctgtaaaagctagaaggtcaggggaaaactaggattgagaacaggataagatattcacaaatgtgcttttttgtacagctttaagttttgaatcgcatgactatgtgacctagtcaaactatttcagagtaaaaataaacagccagtagagtctctatcgccctaggagtggaggctgatcacagggtaatctaaggatgagatcataaaataaaacaaaccctccaagcaaaaaaaaaaaaaaaaagttttagatgccagaaaacatttgaatctacagcctgccacttggcagctaagtagcttgaaagctgttggagcaacactccttaattcaaccaaatactgtctcagcatctgcgaggtgcctgatctagtgcccaatgttggaggtgaaatgatgaggaaaaaacagacctgctctcttgaagggggccagcccttccacccctgtggatatttctcatcaggtgggatgagagactgagaaaagaaagaagacacagagacaaagtatagagaaagaacagtgggcccaggggaccggcgctcagcatacagaggacccacaccagcactggtctctgagttccctcagtatttattgatcactatctctaccatctcggtgagggggatatggcaggactatagggtgatggtggggagagggtcagcaggaaaacatgtgagcaaaggactctgtgtcataaataagtttaaggaaaggtgctgtgtgtgccttgttgtgcacataggccagatttatgtttgactttacacaaacatctcagtgcagtaaagatcagtattgcccccagcatgtctcacctccggccataaggcggttttctcctatctcagtaaacaaaatttacgattgggttttacactgagacattccattcccaaggacgagcaggagacagatggcttcctcttatctcaactgcaaagaggccttcctgttttactaatcctccagggcccaaaccctttatgggtgtcgggctgggggagggtcaagtctttcccttcccaagaggccatatctcaggctgtctcagtggggagaaaccttggacaatacccaggctttctagggcagaggtccctgtggccttccgcagtgcattgtgtccctgggtactcgagactggggaatggtgatgacttttaccaagcatactgcctgcaaacacattttaacaaagcacatcctgcacagccctaaatccattaaaccttgagtcaacacagcacatgtttctgtgagcacaaggttggggctagggttacagattaacagcatctcaaggcagaagaatttcttagtacagaacaaaatggagttccttatgtctactttcttcatagacacagtaacagtctgatctctctttcttttccccacactctctgccttcaggaagtttagaatccagatggggaatgcacatggaaatctacaaaatgttaaactgcagttcccctaagtgctaggaagaagaggaacacgatcctatggaaggccagactggtgagggaaagttgctctgaattagtgatgtttgaagatcctgaaggaggaaaaatgcagaaaatggggggaaagaaaagttcaggcagaagaaagagcatgcacagaggcctgaaggtgatgaaaggatgtcagcagcatatgaggggccaaaagagggccagtgtgtcagaacagggagagcaaggtggagtatgggagagggaagaaagaaccggaacatgcagacttgatggccattttaaggatgtttgccattgtccagaccccaagcagaacagtcattgcaagtttcaaagtttaaagctagagagtttcataatcacagctctattaagcttaaaaagtatgctatatgaggaatccttggctcagtgcgtggcaacctttttgtcatcaagtcacagttttgattaagttcaggcacacctatactcttgattcctcctcttcccctcactgggactaataacattacttgtattaattgtgtttcttgctagacactgttttaaggactttacatttacttctcacaacaaacctgaggcagatattttaaagctaaagtcaagaccttggtaaattagttgctctatggcacatggcttgggcatggcagggcaggattcaaactaagcagtgtgacttcaggatacattccaaatcactatgcaggactgcctcttggcccaggagggactgaggtcatgggagcagatgaagggtgatcttcagtgaaactataaggatcttgggtttgggagcagacatgatgtgtaccaagcttaggtatgcactgagcctccttcatctgggaggtcaagctctgaaaggtacgttaagcaattgctcagggtaggcctggccaactcatccttagaccctgatagagcataagcaacctgaccttaccatggaaggatgtgcagattcacaaaggccagatgtggatagggcctggttggtggagcgcccatttctgattctttgctggagagtatctgctctgaatctatcccattataatgtgggggtaatgatggggcactaatccaggatttagggcaaagatgcacaaaattaggtgtgcaccagaaagccctcattacaaatgcagagtgccaggttccagccccagaggatctggtttaggaagtctaggggtgactcagggatttgcatctttttaaatttctgagagacttgcggcaagaagctcacagacaattacaaatactcctggagtattctgtgcttacaaatgctgtaacaggctctcctcagtacacttaggtcttggctcaaattacatccagaaaagccttcccttggagaaaaaaaataacatatttttaaaagcccccatcactacgtatgcattagtatccactactagtctttttctccttcctaacatcgtacaatctgtttctctgcctcactcaatggtaaagtttataaaggttattcctttgcctgtattgttcaccgatccatcctactgtatctaaaacagtgccttgcacagtgatgatatataaaagttacttagtggccaggcgcagtggctcatgcctgtaatcccagcatttgggaggccgaagtgggtgaatcacgaggtcaggagtttgagaccagcctggcaaacatggtgaaagtccatctctactacaaatacaaaaaattagctgggcgtggtggcaggcacctgtaatcccagctactcgggaggctaaggcaggagaatcgcttgatcccgggaggcaaagtttgcagtgagctgagttcgtgccactgcattccatcctgggcgacagagcaaggctccatctcaaaaaaaaggttacctagtaacccaggatttctgttgaattctgacctagccacaaggcaaatttccatttattttcctatgagcagcacttactgtaacttggacagtgtatccatatgggatgaaggttaaaaaaccagataaagaaggccaagagacctactcccagaaaagtgagaatgatgaagataaatcatgtctcaaaaaaaaaaaaaagaaaagaaaaatcacatctcagttcagcaggtcacagagaagctgggatctctgaaatggtaaccctagcgggtgataggtcttatggacaaataaaagcgtcatctctaagacgtcccaaaagaaacccacctcctcccatctgttacagtctcatccattctcagagactaagattttcctcctcctttgtgttctacttattctaagagtccttttccttttctgctctgccccttttatatttggctaagtctttctaatcacacaaaagttgtgagtgacaattctattctttacaactgtcattcccttcaatgacaaaatacgcttctctttccaaatcattctctctccaaatcaatacataattagtttttgtttttctatgtgttgggaaatattagatcatgcaaagcagcctctccagcataactttctgggatgttggaaataatgacaaagagtcctcattgtctgaaagttctgttcactctgctgtccagtttagtagcctctactcacatatacagctcttgagcagtgagggaactgaatttttaaattttgtgttcagtttctttaattctaaaatttaagtagctacaaaacttagcagggaatttgtaatctcttggagagataagacacgggcaaaaacaaacaaacaaaaagccctcctttttgtactaaggtgcttaagtaccattaacagcagtccttctgctactccttgaacaataaattatcgcgtcccctggacacagttactccatgtccatttcacctaatgtagatatttgcaccgcctgactagattgcctgagtgtaatgataccacttaaaattaaccccacaaactctccaggagaccacaaactttttcttctttgacctcagctcctggaacaggacaaggtacaaaggaaataattttaaaatatttgtttaatgaaacaaattgactagtttcacagatccctctgcataatacaaagttctgaaagtttatggtcctggttttcaattaatcctccacactggcactggtctaaggaaactgaattgacacatatgtgtcccacattccaccattacagtattagccctttcccaccaactgccccttatgaagcttttcagtcactgcaacactcccgacaccaattatctcatctgttttaaaaattcacagtacttcatttcctccacttaaaagtacttgggcttcctttactcatttaattgacacagtcgagcaattgctgtgtatgtgcttaggttaacatcaaatttgcctgtgtatcacagcatacattttaataggatgagtttatcaggctatctcagccttatacatgttctctcagtgtatgcttttcggccacataatgaactacaaatttttgctcaacccttttccacatagatctgagttttcttcctatgggttttctgtaacataaaataagacataattgatcacggaaggcacaaccacattcactgcattcacaaggtttctgtcctgtgcaaatcctctgttatctcctgaggctgcacatctgaccactggctgtcccacaaggactacgttcctgtttgcgaggaggccgctgatgtttaatgatgtctgaggggccacagaaggcacttgtgtagtcgccccgttagcagagtttttctcctgcatgacatcactggtgtgtaatgagctgtgcctctctgcaggaggattttccaccttggctgcctcttgtttctcccttgtgtgtattctcttatgcttaaccagacacgacatatacgcaaacgctttcccacactcgttacagccatagggtctctctcctgtatgagtcctttgatggacaatgagcttttgctttgtgctaaaggctttcccacattcactacattcaaagggtttctctcctgtgtgaattctttgatgtttaatgagacctgatttctgagaacaggattttccacattcactgcacacaaagggcgtctttcctgtgtgaaatctctgatgtgctatgagacacgtcttctgaatgaagccttttccacattcattgcatatataaggtttctcacctgtatgaattcgctggtgtacaatgagatttcctttctggatgaagccttttccacattcactgcatatatagggtttctctccggtatgtgttttctgatgtatgttgagccgtgatttcttgagaaaggctttgccacattcagggcattcataaggtttttctcctgtatgagttcgctgatgttcagtaagcatgaactttctggagaaggctttctcacatagactacatctgtggggtttctctcctgtatgcattacctggtgatcagttagccaagacttcttgatgaaggctttcccacattcactgcacacatgatgcttctctaattttcgtgttttctgatgcttgggactgatgaattgggacttagtgctgatgagtttttgacttgcagggaatttaattgcagtatgaagtcgttcatggttagcatgaagaaaggagtccccatttccagtaaactcaacagagttctttatttcatagcctttgctctggttaactaaagttaaattggatttcaaactttttccacgtaagtcaaatatatcatgattttgccctaacagaaactgacttttgctgcaatgaacaatattttcaaatgcatcatgttcatgacatggtttccttctgttcaccaggctttcactctgcaagcgctccagcacatgatcaactttccatatgtctagaaagaaaagaacaaagatttctatcatttagatttggggtaaaagtttgttgtggtttttttgttttttttgtttttttttttaagatggagttttactccgttgtccaggctggagtgcaatgctgcgatctcagctcactgcaacctctgcttcccgggttcaagggattctcctgcctcagcctcccaagttgctgggattacaggtgcctgctaccatgcccggctaatttttgtagttttactacagacggggtctcaccatgttggccaggctggtctcgaactcctgacctcaggtgagccattgtgctcagccaaagtattttttgttttgttttgtttttgggagacggagtctcactctgtcgcccaggctggagtgcagtggtacaatcccggctcacagccaaagtattttttgttgttttttttttgttttttggggacggagtctcactctgtagcccaggctggagtgcagtgacatgatcccggctcactgcaacctccacctcctgagttcaagcgattctcctgcctcagcctcccgagtagctgggattacaggcatgcaccaccgcacccagctaattctgtatatttagtagagacggcgtttcaccatgttagccaggctgatctcgaactcccgacctcaggtgatctgcccgcttcagtctcccaaagttctgggattacaggtgtgagccgctgcacccggccccaaagtattcttttttttaatgccttgatgtgaggtgtctcttagtaataaccctatgacctgagtgtaaataaaactccatgtttaatgttccttgcacattggcaaaaagtaatagtataaacaaactaaaaggtgaaagcagttagcataaaacaaggttagatcactaataataaagacagatttggctgctttctaaatgtgccttgcaaaacagaccttaaaatacaagcaattcactgtgaccagcagaccagaggctggaggcccatttcgtccaaagaacagattcattcattccacatactcttactgaatgatcaccgtgtgccaggtatggtgctggtgttggggataggcacaagaatcgcttgaatccaggaggtggaggttgcggtgagccaagttcacaccattgcgctccagcctgggcacagagcaagactctgtcttaaaaaaaaaataaattaataaaaataaataataataatgaataatttttaagggaatgagtcagggaagtaatcatatgtgtggaacacaccaggcagggtttaggaaagaggatggaaatctctttgtgagcaagatggtattatatcacagagatcactgaaatgagaaatttgacaggtaacatggtttactgggacttggtgtcatcagaatacgatggggaaaaaaacgaaagcaaattattaaatacagaaaggaaccaaatggaagtaggcgggagttgagaatgtaggatgttaaaaaaatgacttttttacttagagatgcatcatgactagcagagacctttaaagaagagagctcttcaggcaggtaatacccagatggccaagattcaggatgtacaggaacaaacgaaaatccaaacttaatggttttcttggaggaaagatgattctagttccttgcagttactaggaactcaggggagagttgccatgaagtaaattacacagaactaaaatctgtgttagataacaacagggagatgtcagtttgggactctcctccagggagcggaaggagtttaaacttactagaatgaaggcaattttgaagagtgaagggcacagatgagaaaatggagaacgggacctttggagaacctaagaataaggaaaaagagaagcgaaggaagccaaggcacagcgaaagtccagtttaccctgaggaagccacatccatcacaggggaggtgttaggaggggaggtcagcattagccaaggggcacaaaggggtgggagtccgaaaacagtgaggacttcaaagtttcctctttggaaagaggcctggaaggtggaatttcgtaacaagagaggtggaacaacatgaagaagggaaatacttgaaacccgaggaagaagaaaattatgcaggcaaacaaacaatatgtagataaaataatcagatctctgaggagataaagagtttttgttttgttttgtttttttttaactctaaattcctacaaagaaaaactggtctcacactgggagacagatgagtagaggaactgtttacatatcctcaaacccccttcacagctgtgctgccttctctgactgtctagaatgtgacttccatagccttctgtcttgtgggttctctcacctgaacaggctccactgtggattccatcttcaattgtccacagttgttctccttgttccaacttgaagagtgcatccggtttgctggcttgataccctgttcatggaaaatgatagaggacttagacatatcaaattgggctggcaatgtcaagaaggaagaatgttacatttcaagaaacttgagtttcttaaaatacccaaaatttagtttcttatctgaaactatgaaagtttcgtttcatatctgtaacatcaaggtttttctcttacaagagggtagattacaccgtcttgtgtgggagcaagagaaggatctgagaatctaccacttcagagtactgcaggcattccaaagaggtaggcatctgagaaaggaaggccactgactaggcaccctctgagtgacacagggcagctgtcctcacccactgccaccaggttgctgtagttctccaacatcacatcccggtacaggtccttctgagcagcgcccaggagttgccactcctcccaagtgaagtccacagccacatcctccagtgttatggattcctgtaataacagtcctgtttaataaagtgatgtctttttgatgatgtggaagaaatgctaaagtttttctgctcatttccactctacaggctgtgtgcatataccaaatagttttttttttaatacaatgtggaagaagtaaagtcctaatataatattctgtaactgtatattcagtcatcctccattcacccaattggaagtttctataaagtgtagaagttaaatcttgctaacctaaaaacaatatatttatacattttatatatgtaaatatatatgaatatatgtacatatatttattttagatacatgcaaatgaaagacatatatacagccatcctttagtatctgtagggtattggttccaggacctcctgaggatactgaggtgtctgatataaaatggcacagtattggtcaggcacagtagatcacacctgtaatcccagcactttcggaggccaaggcaggagggtcactcgagcccaggagttcaagaccagcctgggcaacatgagaccccatctgtacaaaaaattaaaaaattagctaggcacagtggtgagtgcctgtggtcccagctacttgggaggctgaggcaggaggctcatttgagcctaggagttagagactacactgagttatgaccatgctactgcactgcagcctaagcaacagagcaagactgtctctaataaaataaaataaaatggaatagtacttgcagatttgcatgtaacccatgcacatcctcccatatacatttctgtttttttgaaatggagactcactctctttcccaggctggggtgcagtggcataatctcagctcactgcaacctccgcctcccaggagcaggcaattcttctgccccagcctcccaagtagctaggactacaggcatgtgacactacgcctggctaatttttttttttttttttttgagacggagttttgctcctctttcccaggctggagtgcaatggtacaatcttggctcactgcaacctccgcctcccaggttcaagcgattctcctgcctcagcctcccgagtagctaggattacaggtgcccgccaccacaaccagctaattttttgtatttttagtagagatggggtttcactatgttggccaggctgttctcaaactcctgaccttagacgatccacccacctcagcctcccaaagtgctggagttacaggagtgagccaccgtgcccagccccatatactttaaattatctttagattacttataatatctaatacaatgtaaatggtatgttaacagttgttatactatattgtttagggaatcatgacaataaaaaagtctgtatgtgctcagttcagatgcttaaaaaatatatattttcaatcctcagttggttgaatccatggatgtggaagccatggatatggagggccaaccatatatcacaaatccaggcctcctatttttctgatggactaattataaactgagggttcctatgacctccttgagtttgataatttctcaagaagaaggagaaaatcaagtaatggagaaacaatatccaaagatctaacactgaaaatttttcagaactgattaaacactccaaaattcaaactcaagaaatccaacaacttttcaagcaagaagtctacacgtaggcacaacagattgaaactaaattacaccagatacaaagggagactataaaaaaatccaaagaccaatgacaggttacctacaaaggagacaaaattttctgacagctgactgctccacagaaatcattatagccaataaatattggaacaataaatgtaaggtcctcagctcttggacaacacagcccaaccttgaagaccatttaggactgaaaggcatggctggcaaaggacctacagccctgtaatagtgacaattaagactacttatcaatgaattgtcaatctcttgtctcaggatgcaggatggctttaaaggatactgctggtgggaaattgagtcattgaagacccagggaacagcagaaggtacactctatactcattttattacagaggccagtgaacacacttggtagatgatacaagtacttaatcctggttggtttacccattctaaattatttatgtgagatagctatctatttggaaaaaagtaaagtgaaagtcttacctcaatccacactcaaaaatagtttactatatgacagatctatggcaggcagatttgatggctcaatgaactccaccctcccagtgttcacacctttatgtagttcccacttacagggagccaaaggtccgtgggacgtgaccaactcagcattccactggaggctatatgatcaaacagcaaactgtttatcatgaatgcaggatgtgagcaaactcaccattgctcctgccgacagaaggttttctggaggcaatcactccctggtgctgaggttatctactgcaacatttagagaatgtagtcttgcaagcctcctctggactgagcagctgacccctacttccactgcacccccccaactatctcttttgcctaataaatgcagagggctgtgtaaagctcagggcccttgtccactagaggcaaggtaccccctgaccccttcctccgaatatacttttgtctcttgtcttttattcctgtgttcaccccactgtgttcagtccccctaggtctgtgcgggttacaagtggcgcccaaacagggacagaattgggtgctctacaccctctccttgagcagggactggcctagtgacttacctctattcagaatatggcaaaggcgttggaatctcacctccttaattaagctatacatgtttaaaaaaattattcaatgagaattgttaaagcacagtaaggaagactttattcagggccattatgacaggtatatagacaaatgtaatgggattttgcagtggtagagggtgaatggacttaactccaaatatcagcataagcaagtgggaatttatagccaaggagcagagtatgggtcagtaatacaaaattaccaagagggccaggcacaatggcttatgcctgtaatcccagcactttgggaggcaggaggattgcttgagcccaggagttcaagagcagcctgggcaacatgacaagaccccatctcaattaaaaaaaaaaaaaaaaggaaaaaagaaaaaaagcagaaaagtaaaagtaaaaaataaactcatagtcaacccacccccgccacacacacacacacaaaacctttatgatcttttatcatttttcagattaaatacttgattctctcctaacccccaatggtgacaaatgcatttttttcaagtatagctataaactgatggaattttatataattaatgttcttcaatcatttgcaatcattggtctttggatgttcaaagtgtagcatcttcggccaatgaagagtcccttcaagttggctgctatgttctttgaaatatgattctatcatgtaaaatatatatatgtgtatatcataatgaatatatatatctacagatagattcatatatactcacacttttattaatacatatatagacatagatccacaaacagatacagtgacaggaagtaaatattaccaaccatttacagaagtggattaggaagaaaatatgtgaaaagaaaactttttctcttttcttcaattttactaaatatagacaaggtctcactagattgcccaggctagtctcaaactcctgggctcaaggaatcctcctgcctaagcctcccaaagtaggcataagccactgcactcagccagaaactttttttttttttttttttgagatggagtctctctgtcacccaggctggagtgcagtggcaccatttcggctcactgcaatttccgtctcctgggttcacgccattctcctgcctcagcctcccgagtagctgggactacaggcacctgccaccacacccgaccaattttttgtatttttagtagagacagggtttcacggtgtgagccaggatggtctcgatctccagacctcgtgatccacccacctcggtctcccaaagtgctggattacagccatgagccaccgcgcccagccgaaatttattttttgatatgtgtactttcttactttactgggacacaatcacagatgacctatgtggctgatcttaggtccacaccctcccagaagtcaggttttaactttagcctctagttctggaagtttctggcctatcatagatcacagatctatcatagttcgtatttttaggctgtccagtggccaaaggacccaagcaaacaaagacactaccattagcaagatattccagaagcccagagctcaccctccattagcttgaacacaaaggccaaaactccctttgttcaattatttactatacaataaggacttggcattttctacaaggtgaaagtctaaaggaaatctgtaaactccaatccaagtcctgttcagacaatatcactttcaactccctgtctccaaatctatattcaaacaccagttcagctatctgttcattgagaaccatttgaaagtcctggaatcctgccatattcccaggatgtctaggttttattccaagttaaatccagactgccacaaggctgaaattaacttgtgttggtccctgtgtttactgtttgcttagtctattccgtaacagtatataaggagtccttcaagaaacagccacaggaaacctgcatctgaatttatgagaaggctgctattctggacaccatccaccacatcaactctaggaagaaccactgaagaaatttcctgagaccaaagtgccatgaaataatggcaacccccaggaagtaatctgttttatcttcaaaaacaggacataccatgtaaattatgattttcttgtgacattggctgtcagagatattagatgcaagctgacagctaatataatccacaggatcctccagccatgcatggtgtcacaaaattcataatttagtgttaatgctatgaacattatattccttatcctactattttgcatgatattgagtttaaaaactaagcttacttctctccagatcctgctttttgaaatttatactttttatattagtgaaattgatgtttataggcttctacaaatctattatggaacaaaggaaagaataaaacaaaccaaaagtcagttacctgggcctggatcattttcttctgttcttggaagacagcattcaactgggatggtctgtctttgtatcttctggccttctcttcagaagtctcagttttcaatcaagtgtgccccaagaaatggtgaaccccaaatccacttcctccctcttcaggttatgttttttgctcctgaggagtcagaacctgtgggttgaagagcaaattcaatgtaagtggtacattttttccaggcccagatactgtcactgctgctaggcactcatcttaaagcaatgcccccaatatagttaactatatacctttgtttggagccccagcggattttatacctgtggccaataatgtctaggattcttaatgtggtggaggtatgcctttcctctgtgacgtttccgtggaaggactgtgaaggcaggtaggaaatgagacccaccatagcaccagcctcaggagatggtgaactcttaggcagattagttttagaaaagagacaatcagcaaggagaggacctggtctttgttttcctttaaatcatgtgtgctcccacacctcttcaaaagtctttgtacatacaccctgtgaagacatgtacttcagtttgaaagccaatgtactgggcaaatcataagcattgtcataaaaacagtactgacaatattttaggaggttttaaatacataaaaagctaaaatacacaataatttactggataattaggtggtgaataaagttgacgtgctctaaggtttctgtagaatggaaaagtgccaattagcagaagaatatgacaaaggttgcacactacatgtaatctctagttacaattaacactagtaagtccaggcacagtggctcacgcctgtaatcccagcactttgggatgccgaggcgggtggatcacctgacatcaggagtccgagaccggcctagccaacatggtgaaaccccatctctataaaaatacagttattccagaagctgaggcagaagaattgcttgaatccgggagatggaggttgcagtgagacaagcctgtgccattgtactccagtctggtcaaaaagagcgaaacctcgtcttaaaaaaaaaaaaaaaaaaaaaaactagtaattgttttaaagtacgtaagttccatgccaacaaaagggggaaatgtaataacaagaaattcatccaaaagaagagaatcaaaaacagagcaaaaagagcaaatacaatgcatttagatagctgttttaaaataaaatgtactaagaaaattacattacattaagtattttatgctaagtaaaaacagagcatggatcccagttaattacattaaatataaatgcctcaaaactgtcagaatggattaaaaattaaaatccaataacatctggggtttattttattttattttaatttttgagatggagtctcactctgtcgcccaggctggagtgcaatggtgtgatctcggcctcccgggttcaagcaattctctgccttagcctcccgagtagctgagtttacaggcacctgctgcagggagccgaaggctcgtggcccgtgggacgtgaccaactcagcattccactggaggctacagatcaaacagcaaactgtttatcatgaatgcaggatgtcagcaaactcatgactgctccggctgatgaaggtttgctggaggcaatcactccctggcgccgttatctactgcgacatctagagaatgcagtcttgcaagactactctggacccctggcgccgttatctactgcgacatctagagaatgcagtcttgcaagactactctggacccctggcgccgttatctactgcgacatctagagaatgcagtcttgcaagactactctggaccgagcagctgaccccttcttccacctccccttctcactgtctcttttgcctaataaatatgaagggctgtgtaaagctcagggcccttgtcccctagaggcaaagcgcccccgatcccttcttccaaatacactcttttgtctcatctttattcccgtgttcaccccactttgtttagtccacctaggtccgtgcaggttacaaatggcaaccagaacagggactccaagcacgcccaactagcagcatccaaacatgggacttcaaggacgtgaatgaagaaggtctgctggagcagaggaactgaaattgacaaggcgaaaggggaccctgggaagagtctgccggcagcagatataaggtcagtgccctaaagaggtactgggagcagtgctttaaagaagtactgggaagttttctgactcagggtaacaagggaaagaatttgtctattgaagaaaaacattatgtgcagttgcttaaagttctgttgagacagtctgcagctcaggttaattcgcagacactaacctcctgcagaagccacaaaaggttattacacataacccatcgtttccacaggcaggcactcttgatgtggaaaattgggatacagcaggagaaggattaaaacaggctcatcaaaaaggtcttaaagtcgattcttctgttttctccacttggagtttagttcgtactgtacttctgccattatctcattattattctgcaggacagcaagctgaatctaaaaatctgaaagaatttgttgacccacccacagctccaattaaaaataaaaaacaggagagggaggataaaaattggcctatactgcctccttcagttgcagaaacatctgtactgcctccttcggtggcagaaatagaaaccctaatacaaagaatttaatgctctgctgccatagctggagagcccttaggacattgtgcttttcctatttccatcaggcctgatccaaaaaatccacagcaggttattcatgaacacaccccactagagtttaagttgttgaaggaattaaaagcaagagtggtaaatgatggcatacagagcccattcaccttaggattgctagaatctgtgtttggtgctatgcgttttttaccctttgatgtgagacacttggcgcgaacttgcttgtctgctagtgcatatctgacatggaatttaaattggcaagaaatgtgtgcagaccaggctaaacagaaccatgctgctggacacggagacattacagaggatatgctgttaggtcatggcccttattcagatgtagaacgtcaaatggcactcccagatgctgcttatcagcagtgtacacaggccgctaaatgcgcctgggccacaatcctgaagagggagtccctgtacaatcctttttacatatcatgcaagggttgcaggaaccctatgcacaatttcttgcaagattacatgaggcactgaagcgtcagattcctcatactgtggctgcagaaatgctaaccttaactttagcttttgagaatgcaaacgtgtactgtaaacgtgcactggcaccagtgaggtgtacaaaaaacttgggaaattttctcagagcttgtcaggatgtaggaactgagattcatcgatctgcaaagttagcataagcaatggctaatttagcagttgacaaatctaaaaggagccaagggtcaaaccctaaagtgggaaaatgttgtaattgtggaaaaactggacatctaaaaaaggaatgccgccagatctcaggacagaaaggatattacaatgcagttcactccctagcagaaaaaacagcaggactctgtactcgccataacaaaggaaatcactgggctacccagtgctgctcaaaatttcatcagaatggcaccccattggtaaatgagatgggggcctgcacccgggcccctcaaacaatgagggcattcccaatgcagaccacaaccccacttcagggatgggttcctggaggcacattgattccctcaacccaggaacaccaggaagtgcaggattagatctacccaccagagaaagaatcacattagttaggggagacaaacctatttgggtatttggggacctttaccgacaggatacacaggactaattttaggtaaaagctgccttaacttgcaaggcatcactgtagtcctaggaatgactgactccgattatgaaggagaaattcaagtagttttaatgtcacaaaatctttgggtttttgaactgggagaatatattgctcaattattgcttattccctgtgaattacacccttccccatgaaaagagaaatgaggaaataaagggtttgggagcacaactacatgggaaatctatctttcccaacccatagcctctaatagacctacctgtgtagtacacattaaaggaaagaaattttatgggcttatggacatgggagctgatgtgtcagtcatatctataggatgggcacatcaaacattacaacgcatgttgaaaaaacaaaaagggggtataggaggccaactaccacctcaatcaaaactacatttagccttatttactttaaattttctgactcccggtatggatggtaagactccagcagaaagacattggcaagtgttagaggaaaaaagcaaagtttatctgaaagtgttatggaaatccccagaaggacaacaatggaaaggcccggtagatttactgacctggggaagagggtatgcttgtgtgtttacaggagatgggacaagccatgtgggtgccctcaaggtgcatgcgaccatggaatgggagactggaggaacccagggtggccaaccatgggcccagtccctcctgtacgagctatgagtcagctgagcctgagtgcaaagatggagagaaggccaaccagagtcatgatgacatcaacccccataacctggggacaactcaagaaaaccacacaggaagctgagaaactactggagtgtcagggacaggcaaaacccctgattccatgctcttggccatgttagccataatgtcctgtgcactacgttttccctgtgcacaggcaaaaacatattgggcatatgttcccaatcccccagcagtatggcctatactttggagctcactcctcctgagatttatcacgatcagggagagtgggctccaggacccctaactccccgtgacatagaaaagttagactctcagaacaatgtcattaattataccactccactggaaggactccctttgtttatcaccacaaagacgtcgctcagccatagctgtcttgcaattcaagctcaaacatggttgagtcactatggaaaaattatgtacttattaggtcttggttctattaatgtaactggtgtgctaaccaatcattcccagtccagtcaccctaattgtgctgattatacagaatggattccattcaatagttcctaccccactctgtggacccagtgtcttgatccactggctagtaaacaatatatgtcaactgaagacactgtggattgggaacctaaaggtcaattagatggaaaaggtgaaagtcagaaatcatggcacaaacttcactggcattggcggcaagcttttaatgcttcttctttatacaacagcagaatccaatcccagtctgctgctcagattgcttggcatggagcaggctttagcccacctcttcctcagttgcattatctggggaggaaaggaccaattcaagaaactatatggaaggcagcactcccatttatgaatggcaacatctggattggaacactgtctaataatagcaatagtaagcaacacagtcttaatgttgcatttgtaaagaatatcaccactcagtttacagtttgtgtttttaatccttatgcctttttggcagctaagaagaaccagcttcaggtaaacaatacccaattgacctgtaaatcttgccagttatatcacactgcattaatcatagcacattacgaacacataatatctctactttgataatgttgggttgcatccctgggctatggattcttgttaatctgtctgagccttgggctgccacacctgctttgcatttttgtaacacttcttctaactcagcttactcactgtgtccatagagccttaggcataatttttgctattgtttccttggtcaaactaataacttctgttgtgatatcttctgtaactctgcataattctattcaaacatctcagtaggtggagaactggacacgcacagctgaccaagcgaggctacttcagaataaaattaacactgagttacaaactgaagtggcaatgttgaaatccatggttctgtggttaggagaacaggtacaaagcttgcagttgcagcagcaattgcgtcatcattttaatcacattcatatttgcgtaactaactcagaatataaccaaagtgagtatccgtgggaccttgtgaaagcccatttgcaaggagctttcacatccaacatcacctttgatattggtgaattacaaaacaaaattattgatttaaataggcaaactcaagaatttcagccttctttagaagactggaccgaattccaggaaggcctggagagcctcaacccttggacctatctaaggcaccacattaacatcttatatgtagttcttggaataatgttgttttgtctctgtcttcggtttatagtctgtaaaatcggatggaccaccaattggagaatgagagcctcccagcccagccttacattctttcaattaatacataaacagaaagggggatatgcagggagccaaaggcctgtgggacgtgaccaactcagcattctgctggaggctatatgatcaaacagcaaactgtttatcatgaatacaggatgtgagcaaactcaggactgctcctgccaacataaggtttgctggaggcaatcactccctggcaccgaggttatctactgcgacatctagagaatgcagtcttgcaagcctactctgaactgagcagccgaccccttcttccacccccccaccctcctatctcttttgcctaataaatacggagggctgtgtaaagctcagggcccttgtccactagaggtaaggtgctccctgaccccttctcccaaatatactcttttgtctcctgtctttattcccacgttcacccccatttgtgcagtcccatgggtccatgtgggttacggcccgccaccgcgcctggctgatttttgtatttttagtagagatcggatttcagcatcttggtcaggctggccttcaactccggatctcatcacacacccgcctcagcctccccacatgcggttattatagttgatatgtctgaaccaaaatgatatgggaagcttgagaataaaaggttggagacaatatgccacagagagagtaaccaaagataatctgttataactatatctcagacaaaactgaccagaaatcctaaagaattaacagagagaaagagaaacaatgctcactgaaaagaggtgaaatttggctcttcattcatagaaatacaccatatgtatacccctaacaacagtcttgaaatgtatacagcaaaaaatagaaccaaaaacaagaaatagaaaattcagactaaagactttaacagacctttcctagtaactgacagaacagaccatcaacaaacaaaataaaatttataaatgagaaagaaatgaatcttttatctgaggaatgtgactccctttaaattatcaggtctagagaggcattaaaatgtgacagcagtctttctgataggggttcccctgaaaaaaagaaaaaagaaaaaattaaaaactaaaaaaaaaatttaatgtgacaatagtcacatctcatttccccctcaagctaaataattatctcttaaagccacttgctatgtaggctctagactaactcacactgagtagccataaaatgccattcactggacatcctaactcataaaaccccatagttaacaatgtacagccaattgttaattgatattatttctgtaaaccaatgagaattcttgccaaacaactttatgtcagctcacggtttgttcccttttgactttaaaacctgtttctaacaaaatcctaacagagcacttaaccaaggcaacctgaaagtattttcccaggcagctgtcctcattttggctcaagtaaactctttaaaattgtattttgtgcagtttcctcttttaggctgacataaacgatatcatttagaagaactcgaatatatttttaaaattagatttactgagataaattttaacagttttaaataaatgcaaagatgtactataaagatgggctggaaaacaaagcattttaaaaatgtcaagtctcccaaatctacagattcaatgaaatcacagtcacaatcccaaactgatactgaaaagtttaaatagctataaacttttttttaaagtttgaaaaaaaagttagaagacttgccatatcagttatgaggacttataaagctactttaattaggacagcacaatattagtacaataacaggcaaataggacaaaggaacagaataaaatccttataagcagaattaagcacatatagagactcaatggcaatgatagcactacagggaagtagataaaagctgtcttttcaataaatggaactaagggcgccgtggctcacgcctgtaatcctagcactttgggaagctgaggaaggtgtgggggaaagagagatcagactgttactgtgtctatatagaaagaggaagacataagaaactccattttaatctgtacaaagaaaagttcctctgtcttgagatactgttaatctgtaaccctagccccaaccctgtgctcagaaacgtgtgctgtgttggctcaaggtttaatggatttagggctgtgcaggacgtgctttgttaaaatgtgtttgcaggcagtatgcttggtaaaagtcatcaccattctccagtctcaagtacccagggacacaatgcactgcggaaggccgcagggacctctgcccaagaaagcctgggtattgtccaaggtttcctcccactgatacagcctgagatatggtctcgtgggaagggaaaaacctgaccatctcccagcccaacactcgtaaagggtctgtgctgaggaggattagtgaaagaggaagacctctttacagttaaaataagagaaagccatctgtctcctgctcctccctgggaatggaatgtcccggtataaaacccaatcatacattctatttactaagataggagaaaaccaccttataactaaaggtgagacatactggcggcaatactactctttactacactaagatgtctgtgtaaagtcaaacataaatctggcctacgtacacatcaaggcacaggacctttccttaaacttatttataacacagagtcctttactcacatgttttcctactgaccctctccccaccattaccctatagtcctgccacacccccctcaccaagatggtaaaaatagtaatcaataaatactaacaaaactcagagaccagtgccggtgtgggtcccccatatgctgaacaccagtcccctgggcccacttttcttcctctgtactttctctctgtgtctgatttcttttctcagtctctcatttccaccttgcaaaaaatacccacaggtgtggaggggcaggcccccttcaggcaggtggaccacttgagccagagttggagaccagcctggccatcatggtgaaaccccatctctactaaaaatacaaaaattagccaggcaaggtggcacctgctggtaattccagctactcgggaggccgtggcacaagaatcacttgagcccagaaggcagaggttgcagttgagccaagcacgccactacactccagcctgggcgacgagagcaagactctatctaaaaaaattaaaaaaaaaaaaaaaaatcaataaatggtactggggatggggacagaaagttaaaacccccctcacaacatacacaaaaaccattttagaatcaactgtcaatttcaatggtagaaacatatcaataaagctttaaagaacattaatataggagaatctctcaatgttattagggtatggccagatattttaaagaggccacataaagcaccctataaagcaaactatatcctgctaggggaactgtaagtggtacaaccactttagaaaacagtttgacatctatttagacggagtttatacacactctatgaagcagcaattttcctccgaggtgcacatctagatatacatctctgcctcccccatatgagagcacatatgaaccaaaagacatttacacaaattttcacacatgcattattcttaataatacaagctttaggtaatacaaatgtaattaataatagaaaaaactgctatattttacataatggaatgtgatagaaaacctattatacctttggtccagcctgcaagaatgctttttacatttttgaaagactgtaaaacaaaaagcaaattagcatatgcaagagaccatatgtagcctgcaagccctaaaatatttactgtaaattcgcctgatccttgtcattgagcaaagaaaatatactcagatgcaacaggaaagaccctcaccaataatgagcaaaagaaggctgacacaaaaaaagagtgatgtacaattccactgatatacagagtttaaaataggcaaaactgtattaactacaatgataaataatgattaattatataaagaaaagcctaaaatacttttcggtgtgagaatggaaaaagactcacagaacaccactggtgtgctgaccatattctatttcttgacctgggcaatgactgcttatacatatattgcctccatgataattaaattgtacatttaaaatatataaatgtagaaaaattaacaaagtaaaggaagagatcaaccataccaaacagtttacctccaggaaaggtgttaactccagacaacacaacgggtgaattttacaggtgggtaataaaacaagaacgtccactaacaccctattttcctactttatactggaaagttgagccaatgcattaagataagaatgaattataagcattacaaagtaagacagaaaattaatgttattttcaggcgatatcatcacgaacatggaaaaagagattcaagaaattacatatttaaaaaagaaaatgctccctcagaaactcccaggcagattttcacatacatagttggctagaattgcaccatacgcctaagctcatttccatgtcaaacctatcactagcaatggcaattggaaccagcaagattggctaagaccaacaaggccttactaagaaactgggatttgggtcgccttgccacagggatgaatacttcacgaaatggagattctgttaagaaagtgtgaatataaggcgggcaagcaacactcactatatattaagaagtgaaggccgggcgcggtggctcacgcctgtaatcccagcactttggaaagccaaggtgggcggatcacctgaggtcaggagttcgagaccaacctgcccaacgtggtaaaaccctgtctctactaaaaatacaaaaactagccgggcgtggtggcgtgggcctgtagtcccagctactcaggaggctgaggcaggagaatcgcttgaacccgggaggcggagattgcagtgagccgagatcgcgccattgcactccagtctgggagacaaaagtgaaactccgtctcaaaaaataaaaaaaataaataaaaaataaaagaagtgaatgcagaggttggcaacattttcgattttgccggccacgaggtctctgtcacaacaactcaaccgctgcctttgcagccatagacaatatataatcggagggtatgactgaacttgaccccccgatctgtaaatagccaccccaaggatcagaagagtagatatatggtttcgaactaatgctgggggctgtgtcgccttttgccccagtaaccgaggttcgaacctcaacccaggacccagggctccaaagtctcgaaagcttcagccctcacaagcctttgtaccacagacactggccccatgcctcttactcatccgaaccacggaccagacactctacagcgatggacatcctcccagactccaacatcactgagttccaaattaaatcctgaacccgaagcagacgccgcatcgatcctaatcgccacctccatcctttacaagcagagtgatccataccttgacagttaggacacggccgttgatcactacagacccttagtcactgtactcacaccaaaggcacgcggaccacagacagggggatcacagactcccaccaggtacctcccaaatgcctataccccggcgctccccagtcttcctgccaaaaactatgtggtccagggtacaccacgtcctcagatctcccaaaccttccactgagacaaaacctgaactaggacaaaaaactttcagggacaaaaccacacactgacctctattttctccagatacacaagaagggcctcaacgttacacttccgtaaactgctcctacttctggagtcctcgcacgggtttatggtccacctacggcggccgaggagaacctaaaatgtttaaaagagcaaggacaagcgcatttacggcatttcctactctgtaaaatggccgcgcccatagccgtggctcctgacggcagccatgtttgaaaattggacgcacagaaggcagtggcaggtttttgagccaggagccagggaagaagagaagtcactgaaatcgcctcgtttcctggcacttaaagtcttgcgaaagggggcagattttcagagactcaggctttatcaggcaaatatggggcaagctaaattgcctttagcgcttttccatccactttgttaaatttaaaaaaaaaggttttgaaaaagacaagtaacagtgcagccaggtgtaggtatcccagagaatgaattggaaatggaaaaggtaacagatcaggtagaaagggaaaaggcaacacatcaggtaggcagacacccacgggaaagcgtctggcgaaaattagcttgcaggaagcggtttttaagaacagaaaaatagcaggtattcgggggggcgggtggtgaagaaagaaaaaaattataattttttttgagacggagtcttgctctgtcgccaggctggagtgcagtggcgagatctgggctcactgcaacctctgcctccctggttcaagcgattctcctgccttagcctcccaagtagctgggactacaggcacgcgccaccacgcccagctaatttttgtatttttagtagagactggctttcaccatgttggccaagatgatctcgacctcctgacctcgtgatctgcctgtctcggcctcccaaagtgctgggattacaggtgtgagccaccgcgcctggcctcgaaaaaatgattattatttacaaaaaagaagaagaagaaggaggaagaggaggaggagaaggaagagaaaagaggagaaaagaagagaaaagaggagaggagaggagagaaaagagattttgagaatgaattacgatgtgagcctggccacgacagactaaaggaattgggcctcctagaaaggccacttttagtaaaggtgccaatgggaagagcagagccagaattgagagtataaaaatattgttaagagtttttgacaaaagtgccaagacaattcaataagaatagtcttttcaacaagcggcactgggataattggatatccacatccagaaaaatgagttaggaccctcaaaccatacacaaaagttaactcaaaatagatcatagatctaagtttaagagaaagtataaaacttagagaaggaaaagggagataatcctcatggacgtgagttaattctgagaggagagtaaaggatgacccacaaaacaaaataaaattaataaagtggacttgatttttttttaagtttgtgcttctaaacacaacatttaagaaagtgaagtggggcacggtggctcacacctgtaatcccagcactttgggaggccgaggcaggcggatcatctgaggtcaggagttccagaccagcctggccaacaaagcgaaaccagtctctactaaaaatacaaaaattacccggacgcggtggcgcgcgcctgtaatcccagctactcgggagcctgaggcaggagaatcgcttgaatccgggaggcggaggttgcagtaagccgagatcgcgccactgcaccccagcctgggcgacagagcaagactcctcggtaaagacaccacttcgtcaccctgaattactctgatttttatgggtacaatgagaatagtggacctaggaagaaaaagtttttaaatagaaaccttcaggacagatttggacttgaaagactgacaggaagtgtttccagcatccagttagtctcaaagcaaccactaaccttcaactgcacacctgaaagcctccagcctcattacattctcaaacacagacaagccccgtcttcctctaaataaaattgccttcaaattcaatttaaaacttaccacagaggcactcctttgacactcctccccctagacctttcattcacgccactcctcttcctagctcgggcttctctgtatctgagccccatattaaattgcaaatctgagcaaaaaacagcattcactgagacacactttccccagttttctattactgagactcatgaaaagtgaacatatagacctcaagctctgtccgtgggaccctcagtcattaaactcttaaaactaagccttaacctttgacatcccaagggtctctttctcacacccatattcctcggtgactaaactgaaataaaacccctgaacacggacattcacatgcgtttccacttcatggtcgtccccacaagctccccatccggattcacacgcagcatcaggctttcaaggctacagtagcagctgccaaaggctgaacacgtatcagaacctacttccgattctggaattctggtgctgcaaccccatccttcgccatctctaagaacaccgagagactgggaggcgggcttccggagagggatatgggacatttcccaaagtccaggttctggctttgaacattttatatgaggtaacatagctgttttacctcatagagcatattatgtcatttctgatgggagtgaccgtagattattagtggagtgatagacacgcacatcaacagaatagagtcaagaaatggacacaagaacaggcaactgatttttacaaatgttcaaaatcaatttaatggaaagaggacagtgttttcaatactgttgaatcaactgggcaaccataggctgaactttaaattaacccttaccctatatacaaagatgaatttaaatggatattgctaaatattaaaaagcaaaactggctgggcgtggtgtctcacgcctgcaatcccagcactttgggaggctgaggtggccagatcacgaggtcaggagatcaagaccatcttggccaacatggtgaaaccccgtctctactaaaaatacaaaaattagctgagcatgccggtgcgtgcctgtaatcctagctacttgggaggctgaggcaggagaatcacctaaacccaggaggcggaggttgcagtgagccaagatcatgccattgaactccagcctgggtgagagagtgagactctgtctcaaaaaaaaaaaaaaaaaaaaaaaaaaaaagaagcaaaactacattattttgtcaaaggaagtggaaaaagaattatcaattacagtaaggaaggaatacttagatgtaatgccaaaaccccacaatccattaaaaaaaaaaaggctgggtgcaatggctcacacctgtaatcccagcactttgggaggccatggtggacagatcacctgaggtcaggagtttgagcccagtttggccaacacggtgaaaccccaatctctacaaaagtacaaaaattagtgggacatgatggcaggtgcctgtaatcccagctactcgggaggctgaggcagaagaatcacttgaacctgggaggcagaggttgcagtgagccgagatcatgccattgcactccagcctgggcaagacagcaagattccatctcaaaaaaaaaagttggacttcatcataattaaaatctttttctctgagagaaaaaaagaaagaaccacatctatggaaaaatatttgcaagtgatataaaacctttatccagctggataaaatctttatccagcattaataaacaatgctctaagcagcgcacagtggcaaatgcctgcagtcccagctactctggaggctgggacagaaaacttctcaagaccaggagtttgagactgtagtgtgctataatggtgcctgtgaatagccactgcactccagcctgagcaacatagtgagaccttgtctcttaaaaaaaaaaaaaaaaaagcctttagggaggtgcaaatggaaggccacatacaattggtatgtttgtattcataccaatacacacacaatagaataggtaaaataaaacattccagtcctgcgtggtggctcacgcctgtaatcccagcacttcaggaggctgaggcgggtggatcacaaggtcaggagttcgagaccagcctggccaagatgatgaaaccccgtcactactaaaaatacaaaaattagccaggcgcagtggcaggcacctgtaatcccagctactcaggaggctgaagcaggagaatcacttgaaccccggaggcagagggtgcagcaagccaagatcgtgccactgcactctagcctggtcaacagagcaagactacatctcaaaacaaaacaatacaaaacaaaaaaaatactgacagcatcaagtggaagaatgtggagcaactgaacctttctatatattgttggtgagcaatgaaacaccactctggttagtatcttacaaaggtaaacatacacttaccttatgacccatgaatcatactctgcagtaattatcctagagaagtaaaaaattgtgctcacacaaagcctgtgtgtacaaatgttcataggatttttatttgtaacagtaagaaaaaccgggaacaaaactaatgtccttcagtgggtgaataaacaaatagtggtatattcgtatcatagattattagtggccaataaaaacagaacaatgatatgcagaacaacttggatggatttcaggttaatctgctttagttgaaatagccaataccaaaagggtacatgctgtatgattccatttttataacatgctactaatgacaaaactaaagatgaaaagatttctgattgccaagggttagggctgaggagaggttgtgactataaacaaggagcatgagggagtttgcattgatgcaacattctgaatctcgattacggtggtggtgacatgaatcaatatatgtgttaagatttcttaaagctacatataaaaaacaaacaaaaatgcatgcatgttaaaactggtgatttccaaataaattctgtagttaacagtattgtaacaatttcactttcctgtatttggtaatgaactatgcttatgtaagttgttatctttggaagaagctgggttaagggcaagaactctggaatattttggtaagattttgtgaatctaaacttatttcaaaataaaaacttacaaaaacatcttatttatattaatttcataacacctgatgttacttataaacttaaacatattcaagtatggtcaattacacttatgaactgaatatactgtatccagtttcattctgaagtactttagttattctgaaataacacaaacttagaaccaaagaaatgcaggagctaatcatataataaaatgaggcaggcataaaatactccggtattatatacaatattaaattttagttcgtgattagaggaagtcacaatttaaaatgtataaaatcagtgacaaggcaactaggaatatggctcaagctatcctgttcccaaatgcacatgaggcatattatctgttaaggttagaattgtgacagaaagctctcatccatcattttgccaaggcttctttccttcattaaattctctgatattttcctaaaagtcttctacattgaatgttttcataagttttttctgcattatttcctagcacacgatgaggcaaaacattttactgaaaaccctgccacaggggtttgccagaggaaagtatttctccagtgtgaactctctcaatctgttgaagttttatttttgggcaaagacgttcctataattattacatttccacgaattagtagtttattcatgatctatgatcacttctgagggggtttatcttcccaccaaaggcttttatagtctgccacattcataggatttttctcagtatacaatttttagacataatgtcctaaaatattttctcaaatgttttgtacatgttttctctgacacaaaacatgaagtaactgatcactaaataaacaaccatgtagtctgcattcatgaaattactcttctttgcagatatcttaagggcctacatctggcaagaggctttcccaaaatgactacctgtgaattctcctgtgtttaacaaggatagacaagtgcgcaaaagctttcccacaatcactacatccatagggcctctctcctgtatgttttctttgatgaacattgagccctgattttgtagtgaaggctttcccgcagtcactgcatttgtacggtttctctcctgtgtgaattctctgatgtgtaataagatcatttttgcgcaaagagaattttccacattcagtacatgcaaaggaagtctttcctgtgtgaaatcgctgatgttgtatgaggcatgtcttcttcctgaaggttttatcacattcattgcatttgtatggcttctctccagtatgagtttgctgatgtatactgagagtactcttcatggtgaagccctttccacattcattgcatatataaggtttctccccagtatgagttcgctgatgtgcaatgagcatgcttttcccagttaagcctttgccacattcactgcatacatagggtttctctcctgtatgagtgcgccgatgtacattgagatgactcttctcagtgaagccttttccacactcattgcaaatataaggtttctctcctgtatgagttcgttgatgtcccattagccggatctttgctggaaagccttttccacactcaccacatacatagggtttttctccagtatgagttcgctgatgcacaataaggcggctcttcacagtgaagccttttccacaatcattgcatatatatggcttctctgcagtatgagttcgctgatgtacaatgaggtcactcttcatggtgaaaccttttcgacattcggtgcatacatagggtttctctccagtatgtgttcgctgatgtctgatgagtgggctcttcaaagcgaagccctttccacactcattgcatttataaggtttctctccagtatgagttcgttgatgtaccatgagacagtgcttcattgaaaagccttttccacattcactacatgtatataatttctctcctgtatgagtttgctgatgtgtgataagactgttcttcaaggtgaagcctttcccacatttattgcatataaagggtttctcaccagtatgagttcgatgatgtgcagtaagacgcctcttctcaatgaagccttttccacattcactacatatataaggtttttctcctgtatgagttttctgatgtgtagtgagactgaactttgtagagaaggccttcccacatacactgcatccatggggtttctctcctgtatgagttcgttgatgataaatgagccgacacttcttgatgaaggctttcccacattggctacatgtgtaaggtttccctcccatatgagttttctgatgtatattgagctgtgatttcttgaggaaggttttgtcacattcagtgcattcataatgtttcagttctgtatgagttctctgatggtccattagtctggattttctggagaaagctttcccacacatactgcatacatgaggtttttctccagtgtgaactctctgatgatcaataaactgagacaacttgaggaaggctttcccacattcactgcatacatgggcattctctatgttgtgagttctctgttgcttaatgaactgggacttattaataggttttgcaattgcaggaaacttcatttcagtataaaattgtttatggttagcatgaaaaagggatttcccatctctattaaactcagcagagttctttaggccagagctccttttctggttttcaaaacttaaatttgattttaaaggtttttcatgtaagtcaaacgtatcacaatcttgcttcagcaggaaatgacctttgttctgattaacaatatttccaaacatattctgttcatggcactgtttcacactcttctgaatactttgattttgcaagtgatgctgcagaggatcatcaattttcctgatttctaggaaagaagagaacagtcaatcactccatcatcttgttttgaaataaactatttaaactattttttaaaactgccttggtgtgaggtgactctttagtgaaaaccctattttatttatttatttttttgtgagcaataaagctttttaatcacctgggtgcaggcggactgagtccgaaaaaggagtcagaaaagggtgataaggggagggcagttttatagcatttgggtaggtagtggaaaattacagctaaagggggttgaaaaccctattttagtataaaggaaactccatgtataaatatccctcatctcttacacattgggagagatgtgtaagattccttttatctcttacacataaaggaaattccatgtataaatatccttcatttcttacaaataaaacacaataatataaacacaccgaaaagtaaaagcaactgtacaaacaaggctagataattcacaatgtatatagatttggctgctttctaaataggtctttatacaatacacacatagtcaaatataaacaggtcactttttgcagggaaccccaaaatttggcaggataccagaccacagaaataaagagaaatatcagaccacacaggttgatcccaaatgacaaaggctgtattaatttattctacaaatgtttgctgaatgacatctatgtgtaagtcactatgctcatgtttgggatatacaaacaccttcctttttttttttttttttttttgagacagggtctctgtcaccaaggctggagtgcagtggcacaatctcagcttacttgcaactataacctctccctcccaggctcaagtgatcctcccacctcagcctcttgattagctgggaccacaggcatgtgccaccacacccagctaattttttgtatttttggtagagatgggtttttgctgtgttatctaggctggtctcacaagctcaagaagatccacctccctccgcctcccaaagtgctgggattacagacatgagccactgcactcagccaattttcacgaaggtttaattttagttaggaaaaaatgaaatcacaaggaagcaaaaaaataaagaaggtaattgcattttgtgaaatgtggttaatggaacaatggagatataagaggtggagaaaatcaagatatagttaaagaaatgacaaggttcactaataggttcaatgggacgagtgaaagagggttaatggaagtgaggactcaaagattattccaaaaattatatggtttcaggctggatacagtggctcacacctgtagtcccagcactttgggaggacaaagcgggtagatcacatgaggccaggagttcaagaccagcctggccaacatagtgaaactgtgtctctactaaaaatacaaaaattaggcatggtggcacatgcccgtagtcccggctacttgggaggctgaggcacaagaatcgcttgaacccaggaggtggaggttgcagtgggctgaaatcacaccactgcactccagctggggtgacacagcaagactctgtctcaaaaaaaaaaaaaaaaaaaaaaacgcaaaactatatggcttcagccattggataggaagaaaaaacctcatgatgaaaataggaatattactatctggaatgaagggaaaaatttagcatgccttgtgaaacacataaagtttaagaccattaccacatatccaagtacaaacatgaagaaattggttgaatatataaatctcgaaaaggccttatctggaaacagcaatgtagatgacatccaacatttacaaattattcaaagaaagagtactggatgagactttagttggaaacatgtagaaaaaaagaatgaaggcacagggccagggatcttgtcaatccaacatgtagagtttgggaattcgttaagtccactgaaatgaaccatacgctgactattatgatcaggtgcacaagtggagacccaggtgtacaaaacaaacatctaggagtggtaagaatgtaatagcctcttgaaaattgctaaaatagattttaagtgttctcacaaaaaaagtaagtacgtgaggtagtatatacattaatttgttcaatttagccattccacaatgtacacatatttcaaaacaacatgttttacatgataaatatatgtattttttatttaggaattaaaaagtaatcatgtcctggtgtggtggttcatgtctgtaatcccagcactttggtagggtgaggcaaagaggatcacttgagcccagaaatttgagaccagcctgggcaacatagtgagacctttctctataaaaaatacagaaattagctgggtgtggtggcatgtagtcccagctaggctaaagtgggaggatcacttgagcccaggagattgaggctgcagtgagccatgattgtgccactgcactccagcctgggtaacagagtagaaaaataaagaaaagaaatcataaatttaaaaaacagaagaatgtgagatcctcagcatttgatttaaagtgtcacatgctgagtgattatcacattccccaaacttgctattcttcttcattctatgtaccaccattaaactaattttcccaaagcacaatctcaagtttagatgaaaggttctatacttaagactccaactaatgacctaactggatcatactatcccgtgttgctacagaaagagggaacaatgatttgcagcaaagtgttaactcagcaggcctgggctattccatccctacacattccaaagaaagaactcgtcttaactgccttctaaaagataacctctgagcccctggaatattctgcctgctaagggtatcttttaatgcctgaggccttgggtcatatcagatagtttatgctagcaatgtgatttatggtggacacctggttttgcatgtctcaggctttgggccacatttgtattgttttgactctgggtggctacagacactgggcttagatgagcttccctagttggcaataacttcacatgtgttgacaaacactgttgcagggaaaattcagcactttgtgcaactccactagaacaggagaactgaaagcttgcacccagtttctcctggattcttctttctatactttttatctttgatgattttaatttgtattatttcactgtcacaaactgtaatcatgagtgtagcagttccctctcctccccattaacgtctaccttctacgtagcaggcaaagtaatctatcaaataaattagttatatcatgtcacttctctactcaaaactccctactgtgttctcaactcatttggaataaaatcaaggtcatgaatgcccttgacaggcagtatgtgacctctgtaccaaaacttccaactatgcccccactgttcttatttccagacagttttgcttttgctcactctactctatccattcaagcttcctagaagttcctcaaacacactccagggtcatttttcaacttctcattgtctcacacctggaacactcttcatccagggagcctacacgtgttcatcatctatctgctcaaaggcaccttaacaaagagctgttcccaccctacaagcacagtgccaactcctaacacttactgttccaccagctgctttaactttccttatagcaatttttactccaagatatgttatttatatatctgcttattactggttatatggttacttctaagagaacaaaagcattgtgaagaataaggacatggtatgttttttctttcttatttgtactgctgatagcgttggaatatagtaggctatcaaaacacaagttttgggtgtgtggtggaggcaggggggtttgtcatccagcctggagtgcagtggcatgaacttggctcattgcaatgtctgcctccagggttcaggcgattctcccacctcagcctcctgagtagctgggattataggcacataccaccacacccggctaatttttgtatttttagtagaaacggggtttcaccatgttggccaggctggtctcgaactcctgaactcaagtgatccatctgccttggcctcccaaaatgctgggattacaggcatgagccaccgcgcccagcccaaaacacaagttttaaaggaaggaatcatatgacaagaaacatgattaactgggactaggtgtcatcaaaatatgatagaaaagtaattaatgttatttctatattctagcaatgaataatctgaaaatgtaatcaagaaaacaattccattaactgcagaaacaaaaagaaaactatacttaggaatatacttagcaaaggaagtaccaaatttatattctgaaagtgataatgcattgtcgaaagaagtcaaagacctaacaggatataaaactgtccagtgttcatggatcagaatacttaatatgatgaaaatgggaatactccccaaaattgttacacagactcagtgcagtacctaccaaaatcctagccactctttttgtagaaatttacaactgattctaaacttcaaatggaaattcaaaggactcagaatagtcaaaacaaccttcaaagcaaagaacaaagatggaggactcacacttcccaatttcaaaacttactatagaaccataatcatcaagactatttgataatatatatttatacatagtatatgttccaaaattgattgtggtatggttacacaactaggtgaatagattaaaaaccactggcttatacaccttaaatgggtgaaatcatgtgatatgtgcattgtatctcaataatagtttacaaatatgatgaaaaaagcaaaagctatacagaaatgaatgcagtcaaaacatctaacatgaattaaagaaagttcagaattagcaaaactatgaaggaagtaatttgcagcaggcataaatgtctgatggtttgggctagaaataatatacgatattaaaagatcttttctaattaatcaaaacattatcttaaagtagagaactttaagagagttcagcatgtagaaaacacttaaggtaatgccagaatttaagatgtgcagtaatgaaagagaccctggatttaaacaggacagcctgcagcacgattcacaacagcaaagacatggaatcaacctaggttcccatcaatggtgaacaggataactgtggtatatatacaccatggaatactacaaagccataaaaaagaactaaagcatgtcatttgcagcaacatggatgcagctggaagccattaccctaagtgaaataactcagaaacagaaaaccaaatactgtgtattctcacttgtaggcaagagctaaacattgggaacacagggacatcaagacaggaacaatagacactggggactccaagaggaagaagggaggaaggcaagggttgaagaaccacctatttggtactatgttcactacttgggtgacaggattgagcttctagtgaatcctcggcatcaggcaatatatccatgagacaaacctgcatatgcacctcctgatgcacctcctgaatctaaaataaaaacataaaagataaaataaaattaaaaaaataaaattatataaggatagccaaaagcattattcttagagggaagatgattcttgttcctcatacacaaaatgggaagttacaggctagttgtcatgaagacaagtaaaatacatggaaataaagtatacattagataatattaaggcagaagttaatttggtagtctcttccagagaatgaagagttaattcacgggaatgaaaaaaacttttaaaagttatgagaacagtaaagaaaatggaagaaggatgggctgggcacggaggctcacgctgtaatcccagcactttgggaggccaaggctgacagattacttgagccaaggagttcaagaccagcctaggcaacatgacaaaaccccacctctataagaaatacaaaaatcagctgagcatggtgatgtgtgcctgtagtcccagccacttaagaggctgaggtgggaggatcgcttgagccgaggaggtcaaggctacagtgagcctgggtgacagatgagaccttctttccaaaaaaaaaaagtatggagaaactcaggattcagtataagaggaataagagaacttaagaaacacataaatgccaatcagagaccaggttatcatgggcacagcatccagagtggagaaaatgagggaaaataatgattcccagagtgggaataatgaaggaaaattattattttcctactagggcaggaagatgcagtagtcagaaaaaagtaatgagttcaaaggtctctctttccggagaggcctggaaaatggaatttcatagcaagagaggtaatacacaagcagagacactgtgacagtggacaagaaaaggcagatttgaaaatcctaagaagataattatgtagacaaaaacaagatgtgcataaaataaacaaagatgaaatctcaaggaaaaaaagtgggggccgggcgcagtggctcaagcctgtaatctcagcactttgggaggccaaggtgggcagatcacaaggtcaagagatcaagaccatcctggccaatatggtgaaaccccgtttctactaaaaatacaaaaattagctgggcgtggtggtacgcacctgtagtcccagctactcaggaggctgaggcaggagaatcccttgaacccgggaggcggaggttgcagtgagccaagattgcgctactgctctccagcctggtgacagagcaagactccatctcaaaaaaaaaaaaaaaaaaagaaaagaaagtggggcatattttccatactataacaaaaaagagctcttccttgggaagaaggagtgatggaggggctgttgctgtgtcctcagatgccctcactgctttgacgcctgctctgtgtgggcagaacatggtgtctgtggctgtccacctggctgctcctctcactcaccagaacagattcgagagtagatttcatcttctgttgtgcaagtttcttctcctcgttccaatttggagagtgcatctggtttgctggcttgataccctgttcatgggaaatgacagaagatttagacaaatcaaacggggctggcaatattgaaaaaggagagttacattttaaggactacataggtatcagatctgtaacaagaaggtagattatactctcttgtgtggggcaagagaatgatgtgagaatctaccacttcagagtactgcaggtaagcagctgagaaaggaaggccactgactgggcaccctctgagtgacacagggcagctgtcctcacccactgccaccaggttgctgtagttctccaacatcacgtcccggtacaggtccttctgagcagggctcaggaactgccactcctcccaggtgaagtccacagccacatcctccagtgttagggattcctgtaataacacacttctgtttaatgaagtcatattcttttggtgataggaaaagaatgtcaaggaagtcattccgctcattttcaccacataggaagctggtggggtttttttcttagtacattttgacagaataagaattccagtaaaatattctgtaactgtgcggtcatccattcattcaacaatgttgaaaagtcaaagaaatgtctgtaatacacagctatccaatcctcttgctaatgaaagaacatctataacatgtagcatctatttcccaataccaaactagtcataagtatatgccagttacaagtagacgaataattcagattcttaaattcactatgagctttcaggccaatatcaaactctgtaatgaagacatggcagatgctagtatcacaagacaatgcattctaaataactatggttaacatagttaaccatattattattttattctgaatgaaataaaagagactatataaaacatgtataaagcacaaagattattagatgattaaacaaatctgtttttttgcttgcttgtttttttttttgagatggagtcttgctctgttgcccaggctggagtgcagtggcacaatctcggctcactgcaacttctgcctcccgggttcaagcaattctcctgcctcagcctccctagtagctgggattacaggcgcacgccaccacacctggctaatttttgtatttttagtagagatgaggtttcaccacgttggccaggctggtctcacactcctgacctcaggtgatccacccgccttggccttccaaagtgctgggattacaggtgtgagccacagcgcctggccatgattaagcaaatttggaaaaaaaaatccttagaatatatatgcagacacatgtatgcacacagacaaattcatatatatgtgtatgttattagacagcgttaataacattaaatacaatgaagaaacagctaaaagaaatctacttttgcatttatgagaaggctacagttaagaacaccacctaccataacacctccgtgaagaactatcaaagatgtatttgagcctcagaattataagccatgaaacattaacatccctcaagaaactggtctgctttctcacagttgatataacttatcatgtttctcttgtatagcttgtcagagatactagaggcaagtttacagcaaatgtaacctacggggtcccacacagtcacaaattccaacatgaatcatgtagtatgaatcctatgaataatatatccctgatccttctttgcccagatttctccaggtcctgatatttccaatttatacttttctgattaattaccctgatttttacaggactttaaaaatacattggagaataaaggaaagaataaaacaaaccaaaagtcacctgggcctgcatcattgtctcctaaatttgggaaatgactgctaacttggacgttctgtatttgtctcttctgaatcagctctaaatttcggttcaaaaacttcaatctccaatcaaggatgtccccagaaatgatgacacccaagtcttggaaactccgcctccttccttcacttgatttctcttgttctcagcacctgtgggctgaagagcaaattactctgagtggtacattctttttaggcccagatgttgtcactgttcctatatgctcaccttaaatcaaggcccccaaatatctctctgttcttttatttagtgctccagaagcttttatatctgggctagtaaaatataacattctgaatatatgggaggtacagcacccttctatataaagttgacgtggtatgactactgctagtaagtgaaagagaatgtggggaaaagaatcgtcacaacgtgatgcccagcagctgggcaatcctcaggcagaccagttttaggaaagaggtcacatagacagttaagatgcacacattttttctttaaaaccatgtgtacccatctaccttttcagaggtctttttacattctaggatactgcaatctgagaacactgtcctaagcaaataataagcactatcttatttaaattattcattaccatccacatctttgactttttttcttttttttttgagactgagtttcactcactctgttgcccaggctggagtgagtaagactccagtggcgtgatctctgttcactgcaacctccatctcctgggttcaagcgattctcctgcttcagccgcctgagaagctgggattacaggtgaacgccacatgcgctgctaatttttgtacttttagtagaaacggggtttcaccatgttggccaggctggtcttgaactcctgagctcaactgatccacccatctcagcctcccaaagtgctgggactacaggcatgagccactgcacccggccgccatccacatcttgatacttgcaaagtattctaagtataaatgtataaaggatactcagcaaaaatatccttgaggaattacatattacagcaaatcctaacggatattcttcaagcaaaagaaagatgactccagtgtaagcagaggagcaaggtctgaagaggaacaaaacggtaagtaattaataaagcctaaatcagtattgactggaaaaataatactgataataatatatcaggaagttttaatatatatagtgttaaaatattccataagaacatataggccgggtgcggtggctcacgcctgtaatcccaacactttgggaggccgaggtgggcagatcacgaggtcaggagttcgagatcagcctgaccaacatggtgaaaccccgtctctactaaaaatacaaaaattagctgggcatggtagcgcgtgcctataatcccagctactcaggaggctgaggcaggagaattgcttgaacccaggaagcggagggtgcagtgagccaagattgtgccattgcactccagcctgggtgacagagtgagattctatctcaaaacaacaacaacaaaaaagaacatataaagtaggaggatggcaaatgaaaacgtattttaagatatctgcatagcagaagagtataaaatactaattaccataacattaacaaataagtttatatgttgtttgtaatcaatagtgtcagcaataaaactaatttttaaaaaattatttccatgttaaaagagaggtctatggtttccgtggcagctactcaactctactgttgtagctcaaaaatgcccacatacaaaaaaatagacaaatgattgtggccaggtcccaacaaaactttattaacagaaacaggtgctgggagatttagtccatgggctctagttgcccaactgtgaatttgtgcagaaaagccatatggtcacctaaatcaagagtcagtaatatagtatccaggacctggaccacctgttttgtaaataaagtcttataagaacacagctacatgcattccatgacatttcatctcaggctattatcacattacaatggcagagttgagaatttgggtctagaatgtcactcagtagaatgcagtataaaaaaataatcaaagatgacttttgaatataaggggcaaattatcagtatttgcctaatacgtctgtattcctttagtcaggtggctggatacaaaatttaaatagaaaaatcctatatcctcctaaagcatatacagatcgagtcagtattaagagcagaacctttcttgggaacaatttaacattctattgaaaattgccaataaaggtatacctggtaacccaaaaccccattcctaaaactttcttaaaaggtaatattggcaaaagtgtgctatctgacaggtcatttttactttcttcacttgatttttcatagggaaaacacaggtttacatcagaaaaatattagcattctacatttaaaataaaattgctgatggtagttcagtaatataagtttacggctttaaatgttttcattaatagaaaaaagagagaaaccaggcgggaggaagggagagaaaaaaatgaatataaatacaaattttacaaaagacaaaaccaaaaataatcctcagagataatcgtgaggaaaagatgtttaactcctcttttggccaacaagtaaagcgacacaagttatgccaatcacacaatgagcaagaagcagaatcagggctgaaaatccacttttgtttcacttcaaaatccacttttactctactttataccgaaccaaaattatctgtaaatcagatgcctccctattaagtaaataaataaagcaattaaagggctattagtagaattctagttaatcatatacagaattatttagaggaatggtacttatgtctgtaacttactttgaaatataccaaaatcgacaacaaataaggaatgattcacaaacagaggaatggatgaatacttagaaaaccagtagagctgatctaatacaatgttaatggtaaaagctaggtggtaggcatattggtattaacattaaacttctttcaatatttccataggttcaaaaattttcacaaaataatatgttaggcagagagaaaaatattgtaatactaagaattaagatgaccaaatataaaataaatatttaaaattaatttatcttttgttatagattataaggaaaggggagtcagaaagcaatacactgcaataaaagtaatagtctagattgaagattaaaggcaggaaaaacaaaattcatggataaatggataatcataaaatgttcctaaaaataatacctaaacattttaaaacatttcacttctatccaaatgtacgcataaacttaatgtgaatgcacttatagtaccaccggctcaaacagtaaaaacaacttctaaatgtttattacataatataaagcgaaaaagataatagtaccatttacataatttatctgaattatgaatattaagcacataacatacacgtctaaaattgaaatattctgaaaatttgacaaaggttatctttgagtaaccgagcttaccatggcagagatgttatcttacttgtgtcagaaagaacctgaaaagaaatatccaagaggatacgctggaaacttgcaggacaaagggtagaagccgcatcttaaatataaaacatactacttttaggtatgctagatgactgatctcgccaaaaacttccatttctgaggattcaagaccaaggggtgatggaaggtgccaaaggggatttaaaaaccagtcgtggagaagggtcttgggcagaaggggaatgctaatgagcatcaattctgttccagcagccagggctggggctaacccatcacctgccatggttcccaggcctccagagctgcagcccacatcggaatctgtggcgctaccaccaccgccaccgggattaattccaaaacctggatcagaaacctccgtaccttaacccccaagacagttcctcaatcatttagtcccaaacaaaacctgaaccataaaccgattcgctgacaaaacaaaccctccagttcgcaatcactgagccccgccaaaggacaacaccaaagacaccagaatgtgacttgggcactcagtagcggatctctagagatctttaaccacaaactacacgaggaccctgtgactggtcccagaggtaccccgatcacacacacacacaccctatcacggacctcttgtagttcccctgcgataggaatcggacccacgctaagctcctgaaagaattccactggcgtcgccaaacgctggcgccgacagataccagtccatcaccactgtccacgaacacgcccagccacggacagaatttcctcccccgtcaccacagcgaccacccagtgactgaacttacttcccagaacttggtgggctccggcctcatctctcggcctcctcagtgcctgacggcgactatccagggtcggaggcgttcccagcgtttgcgcagatgcaagatggccgcgccctcgtcgccttggctccatgggggccgccatctttgagtatctgacgtacacaaggcaaagggcgcgttttggcgctggtgaccgggggtgaccgggggtgaccggggatggccgggaagatgaaagagcactgaaactgtcccatttcctggcacctcaacccttcataaatacgggtccatatacagaggctccagtttacacaagacaaaaatggcgtggaggtaaatccctttcagcagctgaatagaaggctaagatggccgcgacgtttacactttgtacaaaggttaggaaacagttccttgtgagggaaaaggagaaccggccgagaggggacacttcggccaaagccagatttctaacaaagtagcttgaagcgccttttgaacgcagaagagggctgttagctacgctgacggaacaggggtagcagtcacagactaggtaatgaaaacggttggaacgtgccaaaattatgttgggtgaaaggcatggggaaaagccagtaaaagccagaaagtatagttcccaaggcggaggggagagcctgggacccaggtggagccaaatatgagggctggactcaggagaagtggccagaaattaagggaacaggaccacttcagtgagaaaaaaaaggttgggaaagaggccgggcgcggtggctcacgcctgtaatcccagcactttgggaggccgaggtgggcggatcacctgagagcgggagttcgagaccagcctgaccaacatggagaaaccctgtctctactaaaaatacaaaattagccaggcatggtggcgcatgcctgtaatcccagctactcgggaggctgaggcaggagaatcgcttgaacccgggaggcggaggttgctgtgggccaagatggcgtcattgcactccagcctgggcaacaggagcaaaactccatctcaaaaaaaaaacaaaagaaagaaaggttaagaaggagatcacgttatactacgtgtgccaaccgcgaatagtatgtgcaaagtcatggcaatgctgaactgtaaatataaatccaaccaaacttcctatattagaagaatgagagaaaggaaatgcctgtgtgaatctatgtgtgtgatataggtatcagtatataaatatacagagaaattgtcaaactatttttcagagtcaagttcgtgttccatttgctcttctcacccttggtatatgagagtttttctttttttttgttttttttttgtctctttttgaggcaaggtccactctgttgcccagtctggagtgcctggggagatcacagctcactgtaacttggaactcctgggctcctgaatagctgggactacaggtgggcaccaccacacctggctaattttttaattttctgtagagacaagggtctcactatgatgcccagctggtcttgaactggcctcaagcagtcctcccacttcatcctccaaaagtgctgggattacaggtgtgagccacttcacccttcacccggcctataaagagatctgaaaagaaataagaaaaaagatgggcgcggtggctcatgcctgtaatcctaacactttgggaggccaaagcgggaggattgcctgagttcaggagtttgagatcagcctggccaacatggcgaaaccccatagctactaaaatacaaaaaaaattagctgggcatggtgtctcaggcctgtagtcccatttacttggaaggctgaggcacgagaatcgcttgaacccaggaggcagaggttgcagtgagccaagatcatgccactgcaccccagcctgagagacagagtgagactcttgtctcaaaaaaaaaaataaataaaaataaggaaaagatgatcaacttaaaagctccctaaaattttctataaatacatgaaggaaataaacaggacactttttttaatgtaaatgatcctaaacaatttaaaaaataccagttttactaatattcaaacaaatgcaaagtaaacgtgaaatataaatgttttaacccttattaagatttgtaaagattgaatgacaaatcatatttagattataaggccatggaacaaaggcattctgttatgctaagcctctttaagtcttctttttctgcatggtaggtaataatgttgtcaattacatactgctttaaatgaattgagatattatcatactggtcataattcgaagttcttaagcattacattatttctaggtataggattgtgtttctatataaattcgtaaaatgtttttgtagtacagtctgttattacccagtttaaacttttccttctccttgagccatgaattttaagaattgattcaatagaacttttctttgtgagaacaaatatgtgcaaggatatttatggtattgatctgacaattataaggaaacaaatacttttgtggttattgcataaatttattcttgcatctctatattcacatctttggatagtattctccatagtgactgactaatgtgtccaataggacagtagcaagtgtaacacaaatggaggtgagaaataagcttgctcatcaaggcttgcttgtctcttagagatcttccaacacattgtaagaaagcccagactagcctcttgttgactgtgtaaataaaggcctcatccattccagcagaagcccaaatatgtgaaaaaagctatttagaccatgcagccccagtcaaaatccaaccactagagcctccggcccagcagtcccaattgttactaaactctgtggacaaacataatgccatgagtgggtgggggtcacctaatctgccatccaagtgcttatccctgctcctagccaagcaggacttgccagcttgggtggtgtccaagtagggaggggccctcactcttggatcaccataagagttgagacagctgggtctgcaggacattggaaaagtcgggtgtgccttcctctgtagggccacctgggaaggatacagctgtctgcaaaccatgatgtctgcctgagggagccccatgagcagaggatgcccaaggccttgggaacccacgccttgcactagatttaatgactaccctgctgggttttgaacttgcatggaacctatagccctttcttgtggctttctcccttttggaatgggaatgtttacccaacgtctatgcccccattgtatcttggaagcaaataactttttattttacaggctcataggtagaagagacttgccttgtctcagataagactttggacttttgagttaatgctggaatgagttaagactttggggactcttaggaaggcatgatggtattttacaatgtgaggacatgagatttgttggggagggagaccaggggctgaatgatatagtttggatatttgtccctgtccaaatctcatgttgaaatgtaattcccaatgtcagccgggcgtggtggctcacacctgtaatctcagcactttgggaggccgaggcaggtggatcacaagaccaggagatagagaccatcctggctaacatggtgaaaccctgtctctactaaaaatacaaaaaaaaaattagctgggcatggtggcgggcgcctgtagtcccagccactcgggaggctgaggcaggagaatggtgtgaacccaggaggcagagcttgcagtgagccgagatcgtcccactgcactccagcctgggagacagagcgagactccatctcaaaaaaaaaaaaaaaaaaaggaaatgtaatccccaatgttgaaggtggggcctggtgggaggtgtctcagtcatgggggcagatccctcatggcttgatgctgcccttgcaatagtgagtgagtactagcaagatctagctatttgagtgtgcagcacctaccccctccactctgtcttactcctgctccctcttcaccttccaccatgattgtaagcttcctgaggcctccccaggaccagatgccagtgctatgcttcctgtacagcctgtagaatcataagccaattaaacctcttttcttataaattatccagcctcaagtatttatttatagcaatgcaagaatggcctaaaacatgctgtctctacaaaaaaaaaaaaaaaaaaaaaaaaagccaggcatgagggtgcacacacatagtcccacctacatgggaggctgacgcaggaggaacacttgaacccaggagtttgaggctgcagtgagctataatcgcaccactgcactccagcctaggcaacagagactcttttttttgttgtttttgtttgtttttcagacagagcctattccgttgcccaggcctggagtgcagtggcaggatctcagctcactgcaacctctgcctcccaggttcaagtgattcctgcctcagcctcacaagtaattgggattacaggcgccaactgtagagcgcccgatcctgtcactgtttggggcgccactacgtaacccacaaggacctagggggactgaaaaaagtgggggaaacgggaataaaagagacaaaagagtatatttggaagaagggatcaggggacaccttgcctctagtggacaagggccctgagctttacacagccctccatatttattaggcaaaagagatagtgagaaggcgggtggaagaaggggtcagctactcagtccagagtagggtttgcaagatggcattctctagatgtcccagtagataacctcaaggagctcagcaccaggaagcgattgccctcagcaaaccttctggcagcggaagcagtcatgagtttgcccacatcgtgcattcatgataaagtttgctgtttgatcatatagcctccagtggaatgctgagttggtcacatcccatgggccttcggctcccaacagcccagcaccatacccagctaattttttgtgtgtatttttagtagacacagggtttcgccacgttggccaggctggtcttgaacttctgacctcaagtgatccgcctgcctcggcctctcaagagaccctgtctcttaaaaaagaaaaaaaagaggttaagattgtaaatcctaaaaaaaaaaaagcaaaagcaaaagctgtatgtagatttcacagcatctttatttatagcacttaaaaccaggaaaacagtgcaaatatatctcataggtgaatggataaactactacatcaaatatgtatactactctcaaatataaacaactttcatctggttagatacatggtggtaaaaaaaaataataaaacaactattcatcaactcatataaaccttaggagtaatttgctgagtgacaaaaatgccaaaagcttacatactctctatcaataaaaattcatataacttatttatataaaatttataaaaaccatttacaaaaacaattttatttttatcatattcatgaaatgatgaaattatactgataggagaaaagtggttggcagagttaggtttggatggagtgtaagcataaaaaggtagcatgagggactttgtgttcattagttttatgtggttgcagtggttacacgaatctgtacatgtaatacaacttcttagagtacaaactaaaaaagaaaaaaacatgtaaaaattcgtcaaatccaaaataagattagtactttatagtatcctaccaatgttgtttttctggttttgataattatggttatataggatatttttactagaaattggttgaaggatactagcaaagcctctagactgcttttgcaatttcgagttcaaatttatttaagttgaaggtggttttataaactgatcatctctataatcttagttaagcaagtccaaatatgttgttaatatatttaacatattcagtttcttttctacttaagtttgcttaatgtacaattaagctcagagccaaagaaaggaaaagagctaatcataatatggggtggttgttctggagtattttctgacacaaataaattctctaattctcccacaccaattgggtgttctacaattcaattctgaacaactgggtgttctataattcaattctgacactaacttctccaagttagtgcagactccacaagttagtgcagtccaagttagtgcagtgcaagttagttagtgcagtctaaattagtgcagactccacaagttaaggggctcagtccaagacttcccccacatcagatgccactcacaaggacaacctgcagttctgaatggtgataaattccgagttcccactgccctactcaggtttgataatttgctacagggctcacaaaactcaagaaaacagcgtactttgttttactggttataaaggacgcaaatgaacactcaaatgaagaggtacatagagtaaagcctaaaaagggttctcctaatctcaggagcctctacccctatgaagttgggggtgcaccaccctcttgggctatttggagttctcttaatctcattgtctaatctaatctccagcacccctccccttccaggaggtgggagaaatggggcacaaagtctccatcctctagttacttgatcttcctagagaacagccccattctgaggctgtctaggggagcaaccataagtcacttcagtagtataatcaggtgtaattaaaagggcagtgctatgaataacaacaacagcaaaaacaaaacaaaaccaaaaaactcttatcactcatgaaattctaagcgttttaggagctctatgccaggaaccaggaacaaagaccaaatgtatttctcattataccacaattttacacaacagtaaaaataaacagtaatgagacagtatattatggaatcattggcaaggcaactagaaatgaggattaaggtatcctgactgaaaatgcacaccaggtgtattagctgatgtttaaggttatacttattaagaaaaagcactcaaatattcatcattttcaccacatttcatgccttcatgagctgttgatagtttgctaaaggtgttccacatttatttgatagcatgttcggaacaattttactttctatgtgatctcctgacaaatgatgaagcagagtgcgtcgctgaaatcctgccatcaatactgtcaccttaaagttattttccagtgtaaactttgacactcactgaggtcatatttctgagtaaagactttgtcatggtcatcatgtttctatcaacaataagctcacttacgttgaaatctatgatgaaacctgataataaagtctatctttccacagaagacttttcttagtctttgtattcacagaatttatctctgtatacttttcagacatatgagcagaaattattgctcaaaacatctccacattaatatagtttattcaacgtattttcattgacagaaaatatgaggtaaaagaccactaaaggcactaccttatttactgtattcatcaaattgatctctagggcaaattatttcacctcctgaggacagacacacatctgtcaacaggcagcaccatgtttatgttccaattggctagaaacacactgatgtttaatgaagtctgagttgccacaaaaggcatttccatagtcacggcactagtagggttttcttctgcatgagttcacttataaggaaggagctgtgactctccattacaggagttttcaacttgactgattctacccatttctcttgtgtgcattttcttatgtttgacaaggtttgataagtgggagaaggctttctcacaatcactgcatccatacggcctctctcctgtatgcgttctttgatgtacattgagtactgactttgtggtgaaggcttttccacattcattgcactcataaggtttctctcctgtgtgaattctctgatgggtaatgaggccatatttgtgtgaataggattttccgcactcggtacatacaaagggagtctttcctgtatgacatctctcatgttgtatgaggcatattttctggctgaaggctttaccacattcattgcattcatagggtttttctcctgtatgagttcgctgatgtataataagagtgcgctttgtggtgaagcctttaccacattcattgcatatgtaagatttctctcctgtatgagttcgctgatgtataacgagagtgcgtttgacagtgaagccttttccacattcgctgcatatgtaagatttttctcctgtgtgggagcgctgatgtacaatgagattgctcttcacggtaaagccttttccacattcactgcacatatagggtttctctccagtatgagttcgctgatgtacaacaagatagcgcttcatggtgaagccttttccacattcactgcatatatagggtttctcccctgtatgagttcgctgatgtacaatgagattgctcttcacagtgaaaccttttccacattctttgcacacataaggtttctctccactatgagttcgctgatgagcaattagatagcgcttcattgtaaagccctttccacactcactgcacatataggatttctcttctgtatgggtttgttgatgtgtaatgagactactcttcacagtagagccttttctatattcattgggtatacagattttgtctgttgtattagttttcagatgcttagtgaacaggacacttctggataatttctcacattgaccacttccaggattctcttgtatacaaatgttctcatggtaaatgagctgagacttcctaaggaaggtttgctcacattcaatgcatgcatggggtttctcaattttctgagtcctctgatgcttgaagacttggaatttagtatggatacattttgcattttcagaaaatctagttttagtatgcgtacgttcatgcttaccatgtagaagtgttttctcacctccaataaactcaacagggttatttattccatgtcttctcttctggttgattaaacttaaacttgatttcaaattttttctgtacaagtcaaatgtatcatgattttgcactataggaaaatgtgtcttgctgagatgtacaatatttctaagtgtattctgtccattgcattgctgcacgctcttcagaagtctttggtttggagagtgctcttgcagatgactgtcaactttcccgattcctaagaaagaacagagtaacaaattcttccatgagaattgtatgagataaaaatgcttatgaggccgggcacggtggctcatgcctgcaatcccagcacttggggaggctgaggcgggcagatcacgaggtcaggagttcaagaccagcctgaccaatgtggtgaaaccccgtctctactaaaattacaaaattagccgggcgtggtggcacatgcctgtaatcccagctattcaggaggctgaggcaggagaatcacttgatcccaggaggacgaggttgcagcaagccgagattgggccattgcactccagcctgggtgatagagcgagactcagtctaaaaaaaaaaaaaaaaaatcttagcttatgagatgatttgctgggggctggctctttattgtcaactctacgatcccagtataaaaggaaattatgaagatataagctgaaatatatccaagaaatcagatccaagaaaagacaaaaagtctttaaagctataacagcattaaaaaagttatcagatggggagatgaatatatagtggagctgcttaggtaccctcagatacttcatatatgtgacacctttccttaatgactacaataagactcctatagccactgtccttgctggttctcacttacctggacaatttttattctgaattttagcatctgttgtccatggttcttgtccatgtgccaacttggagagtacatctggtttgctagtttgataccctgttcatgaggaaagacaaacacaaacatcctgaattggagtccagtatgtcaagatggaaaaataatacattcgatgaagaaaacaatttcaaagtaagcattctgtcttagaagagattataccactttggggtcagagaggggactgaaaatgtaactcttccaaacaccacagtgactgtaaagctttgattaggtgagcataggacggtgtctgggcattgtaggcacctctaggtgacacagggaaactattcttacccagtgatactaggtggttatagttctccaccatcacatcccggtacaggttcttctgagcagtgtccaggagctgccactcctcccagctgaattccacagccacatcctccagggtcagtgattcctgtaattacaaagtcctattcaatatgatataaactcctattgttaatatagaagtataagataattttttaaaaattttcacaatacagcctgcatctatattcctttctcaaatatactttggtaggagcaaaatcctctatctatacattttagcgcctatttctaaatattaaacgtaggcaaatgacatcaggacaaataaaacatccctacattaccaatgacttcacaaccaatataaggatctgtcatgaatagacttcacatcttgaattcataaaatagtgcttttaaataaatgtaagagaaaagatgaaactatatctgtataaagcacaaaaggcccctaaagttgattagatttttatttattttttaatttttaaagagagatggtcttgctctgtagccccaaatggagtgcagtgtcacagtaatagctcaatgcaaccttgaactcctaagctcaagcgaccttcccacctcagcctctcaagtaactaggactacaggtggatgctactaccaatttttgtagtgacagggtcttgttatgttgaccaggctggtcttgaagtcctggcctcaagagatcctcctgcctcggccttccaaagtgctgggattacaggtgtgtgccactgcgcccagcaaaaaaaaacttctaacagaaaaacatatatacatatgtgtattaatggacagattaacagcatattagatacattgaagattattggtgaattggaatatataagtggaaatggcagaaaatgcagtacagagaaaaaagataaatcataacaaagaagttaataaatatgaaatacagagttgcaagacctagtgtatgcccacttatggtttctaaaagggaaaatagtgtaatagagaagcaatatctattaataaatatccaaaacctaaaatatttcagaactaaatacctcaaatctcaaattcagaaatcccaacaagttcagagcaggaagtcacaactggtgtgacacatcagactgaaactaccatacatcaaatgcaaagggaaaactatagaatcatcaagagacaaaagacagattacctacaaagaaataacaaaatatactgatggctgacatttcaataatagaatccagaaacgtatggaatacaatcttcaaagtcctaattcttgcaacaaaaaaggccaattttggaaggccatttgggattaaaacacatggctagcagatgacttgctgtcttacaaccatgatatcaaggacctgtttgtcaactaaactgtcattctcctgcttcacaataacttttcagagaactgcagagtgtgaagtagaggtaactaagatccaaggaaatactgataagagaatctatgctatattactgtgtgggatgctgcatagtcaagaaagtagactcatgagagtgcgcaagtgctcaagcctggtcagtttatctcattccaaaatctttatgtgagatgtctatcgactgggtaagtgtaaagttaaatttctacctcactccacagtccaaaagaatttattactggatggaaatcttgcaggccaactctaaggtgtcctctgataatctcattctctagctgcagtgacttctgacatcaactacctgggttaggccaaacttcccaggttaaaagcacaatcctccacaagactgccctcacttcagacacaagctgcaagcttaaggctacacagaccaccctcaactccagcgagctggctacaaatgtgtggagctaccatgactccctcaggtttaataacttgatagaacaactcagagaacccaagaaagtgctgtgtttacaattagcactttactattgcaaaatgacacaaatcagaatcagctaaaggaaaatatgcacagggtgaggtctgggaaggttccaaacacaaagctgctgactgtcctctcctcatggaatccttggtggcattacatcttcctgactacattgtgtaacaatattcaagagtacttgccagccagcgaggcgcacctaaactttgatgtccagagattttattgagacttcatgatgtaggcacagtttattgaagcattgcccatgtagctgagttcagtctccagttccctccccttcctgactggtattacatggctcaaagccacaactctctaatcacttagtgcgctttttggcatgggcagcccctatccagagtcatgtcattgccataaattatctagggatctactatgagtcaccactatacatatagatataaactatcaaatatgagtggcccaccatgaatgacagagacactcataacttgggtaattacaagggtttagaggttacctcccaggaacgaaaacaaaggctagccaaattctttattacactctaggtgttcctgcccctgtgcagtaccatcctcctgagtatgaagtggcctaaaagcttgtttctaaagaaaagaatacagcaaaagtgacaagatgccactttaagattacactctatatgacttccatcttgctagcagaatctgtcattttctagctttgattaaacaatttggcacataggggaggtgcatgtgacaaaaaactaaaagtgggctttgacaaacagacaggtagaaactgaggacctcaactaaactacctcatttctcattctggaaatgaatcctcccaacaaccacataagtgagcttagaactgcatctttccccatttcagccttcagatcagattccaacccagctaacaccttgacgacaacccccatgagagactgtgaatcaaagtagccaggtaagccatgcccttattcctgagccacagaaagtgtgagatttttttttttaagtgttgtttcaagtcactaccttttggagtaatttcttaggtattaatagacaatgaatataagatgtaaacttaagaagaacttatgaggccaggagtggggcacacatctgtaattacagtacttccagaggagagtttgagcccaggagtttgagaccaacctgagcaacatagtgagactctgtctctattctctacaaagaacaaaaaattagctgggtgtggtagtggatgcctgtggtctcagctattcaggaggctaaggcaggcagatggtggttgaggctgcagtgagccataattgtgctactgcactccatcctggggaagagggcgagtccctgtctcaaataaagaaaaaaaaaaaaggaataaatgaaaacatgttcatgatataagtaaaaagctttaaaaaaaatgacttctgcatgggaaaaaatattttgaacaagctaaaagagaagtaagactctagaaaaatatttgcaacatataaaagaatcaatatccagtcaagataaacaattataaatcagtaagaccacaaaaaaattaaatgaacaaagactaaagacactttatgacagaataaataatccaaagaaacaacaaagagatgagaaggatctgaacctcactggtgaatgggaaaatgcaaaataaggcaaaataatactggatcatctagatcatggaaaatacacaatttgataacatagtaagtgttggcaagatttgcagcactgaatgtttttgtgcagtgttttccaacactaacaaccaattctccaattatctaaacataaactagatgtccaacaattcaattcaattctgacactatctttgtcagaatccacagatttaagggttcaatcctacaagactgcctcctcttgagttcctctgcccggccgccccactgtctgggaagtgagaagcgcctctgcctagccgcccaccatctgggaagtgaggagcacctctgcccggccgccccacaccaccgccgccatctgggaagtgaggagtgcctctgcctggcccccgcaacgtctgggaagtgaggagcgcctttgcgcggctgctgtgcgaccctccaagtgtgaagtgacagccttgtgtgtgatctttctgccctccccaagtttgcattttcgacattaaagtttacttttcaattaaaatttttaaattggagaatatataatttaaaaaaaaaaaaaaaagactgcctcctcttaagatgccagtcacaagtcctgggctaccagtatttctgactaactggctataaattagaggctcccacaaacccctcctcaggtttgataatttactagaacagctcatagaactcaggaaacactttacctatggtacctagttaataatagaggatataactgaggaacagccagactgaagaaatgcatagggcaagatatggaagagggtgtgccaagcttccattcctctctgcgtgtggcatcctcccagcaccctggtatgttcacaaacctgaagcttgttcaagagtacaaaaaattagccgggtgtggtggtgggtgcctgtagtcccagctactcaggaggctgaggcaggagaatggcatgaatccggaggcggagcttgcagtgagccaagatcatgccagtgcccgccagcctgggcatcagagtgagacgccatctcaaaaaaaaaaaaagaaaaaaaaaaaaagaaaaaaactcacagcctgggcgacagagcgagactctgtctcaaaacaataataataataaataaaatttttttttttttgagatggagtatcgctctgtcacccaggctggagtgcagtggcacgatctcagttcactgcaacctccacctcccgggttcaagggattctcctgcctcagcctcctgagtagctgggactataggcacgtgccaccacgcccagctaatttttgtatttttagtagagacgggctttcaccatgtaggccaggatggtctcgatctcttgacctcatgatccgctcgggattacaggcgcgagcccccatgcccagcctgttcaagagtttttatagaacttactctccagtccattcctcctttcagttccaatcctctaattgcttggtctttctggggaccagtctcatcctgacactatctagaggtctcatgagtagtcacctcatgagcagaaattcaggtgtatcacagggtttccttatgaataacaaaagacacacctatttctcaggaagaaattccaagggttttaagcatactgtgccatgaactgggaacaatgaccaaatatacttatccgtgtcactttctatataccagactgtgaaaaataaatatacatttggtctctgccctccaaatctttggaattgctgaagtgtcttttatatgctattgagatgactggtgcctggggctcttccatggcctcaggaagggagctggttgccaggggaaccaaccttgtgacagacagttggaactttcagtctcacctctccaaccaacccctgacctctgtggaagggagaggtgatggaaattgagcttaccaccaatagttaatgaattaataaattatgcctatgtaatgaacccaccaaaacaataaaaggatgaggttgagagcttccaggctgctgaacatagggtagtcctgggagggtagaatacccagaaagggcatggaagccctgaggcccttccccattacctgacctatgcatcttttccaactggccattcctgagttgtaccctttcataataagccagtaatctagtaagtaaactgtcttcctgcattttttgagccttctagcagatgaatagatctgagaagggggttgtggggacatccaattggtagccaagtccaaaagaacttgtgagtaacctggggacccagcacttttcaggggggcagtattgtgggactgagccctcaacctgtggagtctgtcctaagtctagacaattagtgtcagaattgagtaaattttagaatacctaataggtatggagaattgaattgatgtgtgggaaaaaccccacatatctggtgtcagatgtggggaaaagaaagagagatcagactgttactgtgtctatgtagaaagaagtagacgtaagagacttcattttgttctgtactaagagaaattcttctgccttgagatgctgttaatctgtaaccgtagccctaaccctgtgctcgcagaaatatgtgctgtgttgactcaaggtttaatggatttagggctatgcagaatgtcctttgttaaaaaagcacttgaaggcagtatgcttgttaaaagtcatcaccattctctaatctcaagtacccagggacacaacacactgcagaaggccacaggggcctctgcctaggaaagccaggtattgtccaaggtttcttcccaagtgatagcctgagatatggcctcgtgggaagggaaagacctgaccgtcccccagcatgacaccgggggatacccgtaaagggtctgtgctgaggaggattagaaaaagaggaaggcctttttgcagttgagataagaggaaggcatctgtctcctgccaactacttgggaggctgaggcaagagaatggcgtgaacctgggaggcagagcttgcagtgagccaagactgcgccactgcactccagcctgggcaacagagcaagactctgtctcaaaataaataaataaataaattagtaattttaaaaaagttggttggcaggcaccagcatgcaaagaatgccaatattccaaaaatggtctggagtatgtacattaaaatgacaaccatagttccttcttgagtggtgggtgattcatgtatcattgtaatggtcaaaagttgaactaccaacaaagcatggattctttcatattgagtctacttttttttccttctttttgagacagggtcttactttgtcacccaggttggagtgcggtggtgcaaacatggctcactgtagcctcgtcctcctgagctctagcaattcttctcccaccttagcctcccgagtagctgggattacaggtgtgcaccaccacacccagctaatttttgtattttttgtagagacggggtttcaccatgttgcccaggctggtcttgaactcctgagctcaagcgatccagaatctacttcttaaggcagaatgaacccccacctctactcccaaaagcaatgtaagttaatttctccctagaacacaattatcccagtatatacttccttaagttcaactgacttcttcaggccaccataaatctatcaaaaaatcaaagggaaaatatcacctgggtcttgatcattttcttctgtgctcagaaaatagtggataacatggactatacgtctttgtctcttctgcatttgccatgaagtttttgaagttttcctagtcagaaatattagtgtccacttaaagttgtccccagaaattatgatatccaaggccagcaacctccttcttcttccttcattgcttcacttgagttattttgcttctgggagccaggacctgaggactgataaacaaaatggctttcagtgtacattaaccctgggtccagacattgtcactgctgctctgcacttaccttaaataaaagaccctaatatttctaacagttcctttatttgctgcctcagaggttttcatggttctaaatgtgtgaaatctatgcctttcttttgtgaagtagaagtggcatgactattatagagaaggtgggaaagcagaaccagcacagcacaatgcctcagaggcaggtgtctggggaaaagaaagagagatcagactgttactgtgtctatgcagaaagaagtagacataagaggctccattttgttctgtactaagagaaattcttctgccttgagatgctgttaatctgtaaccctagctccaaccctatgctagcagagacatgtgctgtgttgactcaaggtttaatggatttagggctgtgcaggatgtgctttgttaaaaacgtgcttgaaggcagtatgcttggtaaaagtcatcaccattctctaatctcaactacccagagacacaatacactgcggaaggccgcggggacctctgcctaggaaaaccaggtattgtccaaggtttctccccatatgatagcctgagatatggcctcgtgggaagggaaagacctgaccgtcccctaccccgacacctgtaaagggtctctgctgaggaggatcagtaaaagaggaaggcctctttgcggttgagataagagaaaggcatctgtctcctcctcgtccctgggaatggaatgtctccgtgtaaaaccccattgtctgttctatttactgagataggagaaaaccgccttagggctggaggtgagacatgctggtggcaatactgctctttattgtaccgaaatgtttgtgtgcgtgcacatcaaggcacagcacgtttccttaaacttatttatgacacagagacctttgttcacatgttttcctgctgaccctctccccactattaccttattgtcctgccacatccccctctccgaggtggtagagatagtgatcaataaatactgagggaactcagagaccagtgccagcgtgggtcctccgtatgctgagtgctggtctcctgggcccacttttctttctctatactttgtctcttatttcttttctcagtctctcatcccacctgacaagaaacacccacaggttgtggaggggtggcccccttcaaggtgaattctcagacagatcaattttaggaaagagaacacatggaaggctccaagaatgtctttaaaaaccacgtgtgcccatgtactggttcgaaagtctctgtaagctctttgggtatacatacctcgtgtcaagaccaatgtactaagcaaatcacaagaactgtctcatttcacattatgcgctaaaggagtaactttacccaagagagctttgtcctttgcccacagttcctatgaggcaaactctaagcctttggaatacgctgcttgataaaactgtctttggttatcagggcaatttaagccatgccaaattgtctatcctaataatgtgatttactgtgggagaccttggaccacgtggtattagtttgatatctggaggagctggagattgaagtcagcctcataggcagtcaattgtgtgtgtgtgtgttaactgatatccaataaaactctggacaccaaggcctaggtgagtggcaacaatggttacaatggctggcaataataatataagggtgtatatataagaatatgataatttaaaaacgtatgaagcaaaacagaatgagagaggattagacaattcaacaataataattgaagactacattaccctacttgcaataataaagaaaacaaatagaaactcagcaaggataccgaaaacttgaacaacattatcaaccaactagacttaacgaacatttaacactgcactcaacagcagtaaaataaacatttttttcaagagcacatgttatattcttcaggaaagataatatcccatgtgatagcctgagatagggcctcatgggaagggaaagacctgaccgtcccccagcccaacacccgtaaagggtgactcacaagggccccagacccagacagagtcggactcgtcgctgatttcctcagactcttcatccctacagccaaaggacccgtcattaacgccccgcttcctcagcgactgcgttcaaatacagccccaatcaggacgctccacgcaccatcggtacacagacccacaggccgcgagtccatgcccagaactcgactcacccgagcccgaacctctccagacaccactggcagcgacaaaacgccgcatccacgtccgaaaacgcttcctattcagacgcgctcctgcgcggactccgggaagctgagcggtaaagaccgtgaagcgaggcgaggaccacggagcctgcccgggatcgcgagttcagactgcgggcgccgctctatgaggtcacagggctgcgcccatcgcagcgtttctgacaggagcggccataatggctgtgggaatcactcttagtcacctcagtgcctttctctcttcgttgcaagggacactcaagagtcgggtgcccagccaaggccaacacggcgcagtggcattctattcagcctgctgtggaaaaaagatggcggcgccctttgtgcccattatagctgagagtggagccttagctggagcaccatgggcacggccatcttagaggaaggcagcagccgtacggcagagaagatgctcatatccaggacaatttggaaaaataaacaaggtttgaagaagtcacggtgctggccaggaagcggtcacagagttgccaaaaccagtggtcactgaaagtgttagatttggggatagggcgggggttctgggctgggtaaggcttttgtgggttagattagactctgactgaatggacgaagccgagaacaggagtgatgctccattaaatgctaatacccacatggggcttgctattaaaaccactgccagtggggaaggggatgaggaggtgaaggtgcaactgtgttaatatctacatgtttccttccagaagtaaaggaagatgacagtggggcacttaagaatatgaaattattagaatgcgatcatcctactttgcaatgtttccagattttttaaaaagtcacacttaaaaaatattagttctatttttgcagatgttggcgttgtaactgtagaagatttaagtaaatattgtatttttggaaggcaacctagagccaatttaattttttcgttttctttgacacagcaattctaaaagctatctaggcaaatctgtcttaatattaaccacaacttttgtaatttacaaaaaaagggaattacaatgagagatgaatactttggtaaattatggaacatctgctgaactgtaagagtatatatcaatttaaaagaatatgctacaattgttttataaaaaagaaaactttgtcagaggacaaaaaaatgatctgcaggatagtatatattttatggtcttgttattggaagaaatcataaacatcttttggaaaattgtgattggttaaacaagacatttagtttgaattaatattgtttgtgttcataggtagagaatgccatgtttttacttgaaaaatattcccaatttatacttaattttactatctttgtaccataatcatgaatatattataaaacatgttgatcttagaaaataggtatgatgatgtataataagttcatggcatgataaatgcaaaataggctgttttctttcagaaaataaatatgctcatgcatttgaaaaattctggagaatatactaacaatatttgactgttccgtacaattatggtgacttaaaatttcttcattttacttacgttttgtaatttctagagaataagaatttcatgttcgtatttcttgagtgttataacatattccatccaggattaaatttcagccccgttcatctggaatgttaatctctggtaggtaagtttagcacctggtccacaggactatgagcagcccatgatgggaccttcactgatcatttccaggagtgggctgataaaactttgccgtggcaggctgtgctgattcacgggacaaggaaggtgattcaagggcctggttggtggagcacttttgtctgattcattgctggagacaatctgccctgaatccatcctgttacagtgtgggaatggtgatgggagcaccaatccacaatttagggcagagatgttcaaatttaagaaggctctttttataaatgcagagtccgaaccccatccccagaaattctagcttggaatgtctggggagtgactcaagaatttgccttcttttacaagcttctcagagaatgctgaggcaggaaccccaaagaaaacacttagaaagttctatagtgttctggacttaaaaatatgatggctgtgtccccacagtatatttaggctttggttcaaattatatctgcacagaaaagcctatcctgaaaactcttcctaaaataactcaggttacaatctatgaacttaccaggctttatatttcttcctagcacttaactgaattcgattttgtatttatcttactcagtctccttcaccagactgtatgtcatatcaaagccagcactttgcctgttttgttcattgatgtgtctccattgcctacaacatgcctgccatggtgtagaagctcaaaaaatattttcaaagaagtaaattactcaatatggagtcagggattgaattctgccacaatactatatggcaaatgtctattacttttataaagagaactcaccatttataaactggattaaatctcattagatcaagggaaataactctggatagagaaaacaggaaccctgtttctagggaaactaataattttttgccaccaggcctgctcaaagagaaatgattaaggaagttcgcacaaaaaggaaataactaaaggaaatattacatcaggaatgaagaaaaaggaacagaaagggtaaatatattataaaatataatattcttttgagttttaaacattgggtttgctggttggaagcaaaagttacaattttacttgatatggttctcagtggatgtagagatgcttaatatcattttgtgttaggggtgtgtaagttgaggccatgatcatataccaccacacacctaataggaaagctaaagcacactggcaatgccaagagctagaaagggcatggaatgcttacacattggtggtgggaatgtaaactagtacagccactctgggaaagagtttggccatttcttataaagttaaacacatttaccatattcgccagcagtcatgcccccagtgtctatcccaaatatataaaaacttaacgttcgcacaatatcgggtacacaaatagtcacagcatctttatttataacagcaaaacactggaaacaacccaaatgtccatcaacagtgaatggatacacaaaccctggtgcatccatttaaaagaatactaactcagtaacaaaaattaaaactatttagacacctaacaacttggatagatcttaagggtaatttgctgagtgaacaaagccctatctcaaagcttgcgtaccttacgattccattttaatagcattcttgaaataacaaaattagggtaatgggatcagtggctaccatgggtcatattgggaggacagtgtgagtataaagaggtagcaagaggaggccaggcgtggtggctcatgcctgtaatcccagcactttgggaggctgaggcgggtggaccgcccggggtcgagagttcaaggccagcctggccaacacagtgaaaccccgtctctactaaaaatacaaaaattagtcgagcgtggtcgtgggtgcctgtaatcccagctacttaggaggctgaggcaggaaaatctcttgaacctgggaggcggggttgcagtgagccaagatcgtgctattacactccaacctgggcaacaagagcagaactccgtggtttttattattatggttatgtaagataacattgatgatgctaagcaaagaatactcaggaaacttttgtatattttgtaatctcttgtgaatctagaattatttcaaaacaaattttagaaaaataacatttaaggcatttttgtaaactacataatggtacctagtaacttggataaacacatccaaatatactgaattacatttatcagtaaattgaaaaaaataaatttggggcctataatatgtaagaactaataaataacaccagattggcacagaaaacacctgtgttatatataggattaaaatttaatcagtgataagaacagcccgctttacaattatggaatcattgataatatgatgcaaggtatgctgtcacagaatagatatcaagtgtatcatgagtttagatttgtgacagtcctcaaatatggttttttttttttttttttgaggcagagtttcgctcttgttgcccaggctggaatgcaatggcgcaatcttggctcactgaaacctctgcctcccaggttcaagtgattctccagcttagcctccagagtagctgggattacaagcgtgagccaccatgctcggctaattttgtatttttagtagagaggggggcttcaccatgttggtcaggctggtctcgaactcccgacctcaagtgatccacccaccttggcctcccaaagtgctgggattacaggtgcaagccaccatgcccggcattatgtatcattttcatgagacttttttacttcatgaatttcctgatcctttttaaagttactcttcatataagttttatttctgtatgaagtaatgatgatgaggcagcatgtatcactgaaatcctcgtgtattcactgccatctgaaacttgttctccagtatgaaatatatctgccaactgttaaggttttatttctgggcaaaggctttcccatgataatgctgctagtatgtgtaagttcattgatgatctattatgatcactgaagagatagggtctttcttcccatagaaggctttcctagcctactcctttgtaagatttatctcagtaaatacttttcaagacatagttacttagaaaattttcaagacttttctgcattggatgtatcaagtttatttcctacatgtttattgtgacataaaatatgaggtaattaatcaccgaaggcactagtgcattctctgcattcattaaaattcgctcctggaaattgcattgtcttccaagggtgaaaatctagcaacaggctgctctacactgcctatatgcatgtatgctaggagcacactgctgtttaatcagttcacattactaacgtggttttctctctgcatgaatttgtttgtatgtaatcagttcagattctctgcaaaaggactatgtaccttacacatttgtcatgtggacgttgtcatagttttaatgaaggttgacaaatgaaaggttacccccaatccacagactctctctcagatgagtaattttctatacattggtacatcaaagaattcagagcctgaattcatgttgaagcctttctgacattgatagcattcatcctagtgaataacactggattttgaaatatgatttttcatactcagtacacatgtagaaaatctatactgtgaaatctctgatgttgtacaaggcagattttcttcccaaaggcatgaacatgtccactgcattgtcagggtttgtttccattatgagttcgctgatgtacaatgagatttctctttgaggagaaggcttttctacattcactgcatacaaagggtttctctcctgtatgagttcgttgatgaacaattagacggctcttcatagtgaagcctttaccacattcattacatccataaggtttttctccagtatgaacttgcttatgtaaagcaagctctgtttccttggcaaagcctcttccacattcactacatatacaagatttctcttctgtatgaatttgctgatgtacaatgagatagcgtttcatggtgaagccttttccacattcactgcacataaagggtttctctccagtatgagttcgctggtgtacaacaagattgctcttaaaggcaaaaccttttccacattcattgcatatgtacggtttctctccagtatgagttcgctgatgtaacatcagtccgctattcacaatgaaacctttcccacattcactgcacctgtaaggtttctctccagtatgagttcgctgatgtacaatcagccgactcttcaaggggaagcctttcccacattcactgcatgtgtagggcttctctcctgtatgagttcgctgatgtatgatgagcatgcttttcacagtaaaaccttttccacattcactacatagatatgacttctctactgtatgatttctctgatgtacaataagattactcttcctgggaaagccttttccacattcactgcatatgtagggtttctctcctgtatgagttcgttgatgttcgatcatacggctcttcatggtgaagcctttcccacattcattgcatatatatggtttctctcctgtatgatttcgttgatgtatgatgacatagtgttttgtggtgaagcctttcccacattcactacagatgtagggcttctctcctgtatgagttcgctgatgtataataagcatgctcttcccagtgaagccttttccacattcactacatatataggatttctctccagtatgatttcgctgatgtacaatgagattacgcttgcctgggaagccttttccacattcattgcatatgtagggtttctctccagtatgagttcgctgatgttcaatcagacggctcttcatagtgaagacttttccacattcactgcatataaaagatttctctcttttatgaattctttgatgttcatttagcctggactttctggagaacacttttgcacacaaagtacatccataaggtttttctcctgtatgaactctctcatgatcagtgagctgagacttcttgacaaacgctttcccacattcactgcatacgtggtttttttctatttcatgagttctctgatgcttactgacttgggatttagtgctattggcttttgtacttacagagaatttagctgcagaataaagttcttcatagttaccatgaagaaatgatttcccatctccactaaatttagtagagttgttaatttcacagcttttgttctggttgactaaacttaaatttgatttcaaagtttttatatataactcaaatgtatcatgattttccctgaaaagacaaaggcttttggtttgagaggcagtatttccaaatgcattatgttcatggtattgttccacactcttcagcatcctttgattttccaagtgatcctgcagatgatcatcaacttcgttgttttctaggaaagaagagaacaatgaatccttttataatcttgttggggataaaactgtcttcttagaaaaaaaaatccttggtgttttattttgtttattattattattttttgagacagagtctcgctctgttacccaggctggagtgcagtggtatgatctcagctcactgcaacctccgcctcctgggttcaaccaattctcctgcctcagcctcccaagtagctgggattacaggcatgtgccatcatgcctagctaatttttgtatttttagtagagacagggtttcaatatgttggccaggctggtcttgaactcctgacctccagtgatacccctacgtcggcctctcaaaatgctgggattacaggcatgagctaccacacctggccaggtgtttttaaatatcgctatttaatgacaatactacaataatagtataaaagcaacttcatgtatacactttggtaaaaacataataatataaacaaaccaaaaagtaaaagcagtctgtgtgcaaataaggtgaggcagttgacaatctatatcgatttgacagctttctaaacaggaccttgcaaaacatgcggacacagtaaaatacaagcaagtcattattacaagcaaacaacagggcttggaggaacaccattccacaaaattttgggagacaccagaccacaaaggtggaaaaggcaactgattcacaattctgagggttgtatttattcactccactagttatttgtcaaatgactcctatggacaaggcactctgctggcatttgggatacacaaaatatgccttcttttcactcatgctgaattctaattaggaaaaacaatacgaaggaacaaaaaaagaagggagttggtgatgttaagtgtggtttgatggagcagtgtagatgatgagagttggagaaaagcaggatatttttgtataaagaaaagacaaggttaaatgatgaattcaatggggagagtgaggaaagtgagggctcaaagattactaactatatggcttgagccactgggtagatgacagcatctgataatgagatggcaaatattactgcagtccagcacatgtaaagtatatactgtgaaacacactttgaaatggttatcaaatatgtaacacagacatcaagaatctggttggaggtataaatggagaaggcagcatggaaataatcagtacatacatattatttgagaaaaaaggactgaatgacttttttttttttgagacagggtctcactgtcacccaggctggcatgcagtggcacaatcttgcatcactgcaacctccacctcccaggctcaagcaattctcccacctcagcctcctgagtagccgggactacaggcacatgcaaccatgcctgattgatttttgtattgtttgtagagatggagtcttgccatattgcccaagctggtcttgaactcttgggctcaagtgatctgcccacctctgcttcccaaagtgctgggactataggtgtgagccaaggcactgagccaggataccatgttgagaagacatgtagaatgaaagatgaaggtacagaaccaaggttgtagacattccaacatgtggttttgggattatttaagccctgttagaggaaccaaactgtgaatacaaagatcagggtaatatgcttactgagatatatagaataaatacattcacgtacatgttgcctggcaagtaagaattggaaatctccatctgttgaaattaagtcaactgagatagactcttgtgtggtaattgttactaaatttgcccctcttcaatctgtagactaccatctaactttccaaaaacatccatcacgtttaatgaacaactcctatagtcaacactccaccctttggtttagctgtgttgcgttatcatatgtttcattaattatgaaacaggaaaacaatgatagggaattttgcaactggccagtgtaccatgtagttgccttcagaagaaaatgtgctgctgcatgggatatgaaaactgtcattttcttcaatcacattctgcatgcagtagaaaagtcgtatcaaggccaggcacggtggctcacacctgtaatcccagcactttaggaggtcaaggtgggcagatcacttgagctctggagttccagaccagcctgggcaacatggtgaaacacaaaatacaaaaattagccaggcatgcatggtgatatgcgcctgtagtttcagctacttgggatgttgaggtgggaggatcgcttgagcccaggaggttgaggctgcagtgagccaaaatcgtgccactgcactccagcctgagcaacaaagtgagactctaccttaaaaaaaaaaaaaaaaaaaggtcatatccaatttttcccatttcaatgtccctgatacactgtttcctcatctgccaccaataacatctacttcagtaagctacatttatgtctcagcatcagttaagttgtactaaaggataaacttcttctagacaaaggttgtggcatcttcaccttcagtttttcttaagatatttagctgtttcttattattgctacactgctgtcatccaagtgaaaggtcaagactagcaacatattttatgaaaagacaaaaatataaaattaaccaaccctcaaccatgctacctcaattactcatatatacaatcaaaagtcatcttgataaaaaaaagtttacattaccatgaatattaccatgtttctgctccacgatttctccaacaagcagcttctatcactgacctgtatttggccaacttgaagccaatcttttgatagtcaggcccatggccttgcacaattcctatttcatgccttcattcttttttttgagatggagttgtgctcttgttgcccaggctggagtgcaatggcacaatcttggctcaccacaacctctgcctcctgggttcaagcaattctcctgcctcagccttcctgagtagctgggattacaggcatgtgccaccatgcccggctaattttgtatttttagtagagaaggggattctccatgttggtgaggctggtctcaaactcccgacctcaggtgttccccccacctaggcctcccaaagtgctgggattacaggcatgagccaccgcacctgacccatgccttcattcttaattcatgtcaccatcttcctaattcaaaatctagatatgccttgtgcacatcatactcttgctgcaattctgactatcctgccatatgctctatgttctctgtattccttaattaacccctttattgttaatttttatggtaatcttctgtgtagtgaggatctagctctaacctcatccaaacagagatctagcatttgttcttagctattaggaaatgatctctaggcccctggaatgtcctggcccataggagtgtctttgtttgcctggtggctttagccactggacagtttaacaatatgatttgtgataggggctttggcccatgccatatcacttccagcctttggaaaaactggacactctaggtattagcctgacttccaggagaggctgaagactaaaagtcagccatgtgggctgtatgtgactgaaacctaatcaaaactctggccaccaaaggctcaagtgaacttccctagttgtcaatactctgtactgtcacacactgtgtggctgggaagagatgtaacatccacagtgagaggaggaccagagaagtactgtacttggaccccctcctggactacaaatgacctggcaattctactcctaggtgaaggctcaagaaaaatgaaaacatacgttcctaaaaaagttgtacatgaacgttcatagcagcatgattcataaaagccaaaaagtagaaataacccaaatgtcaatgcaatagatgaattgataaataaaatgtggtatatccatacaatggaatattattcaacaataaaaagaaattaagcactgatacatgctaaagaatggaagaatttcaaaaacattatgctaaatgaaagaagccggacacaaaagaccatatatttcatgattctatttatataaaatgtccagaacaggcaaatctatagggataaaaagtagaggccaggcacggtggctcacacctgtaatcccagcactttgggaggccgaggcaggtgggtcacgaggtcaggagtacgagaccaaactggccaacatggtgaaaccctgtctctacaaaaacacaaattagctgggcatgatggtgcgcgcctgtaatcccagctacttgggagcctgaggcaggagaatcgcttgaacccgggaggtggaggttgcagtgagccgagatcacaccattgcactccagcctgggtgacagagtgagactccatctcaaaaaaaaaaaaaaaaaagaaaagaaaagaaaaagaaagtagattagtgattgcctagggctgggggcttggaaacaatttttttttttaagtgatactttgaaaatcttccaaaattgactatggtgatggttacataactgttcatacactacaaagcactgaaaaataaactttaaattggaaaattgtatggtatgtaaattatctaagctgttgaaaaaacaaatctataatgggaaaaacacattagggaaatgaatacaatgctaccgtctaagatgaactaaaggaaaagtagaaatcaaatgtacaaaggaagtactctgagacagacataagttatgacctggtttggtctagaactgatgtaggacataaaacagtcctttctaggtaaacagtaaacaaaaatagtagagacttttaagaagagaactccataggtagaggacattcaatacaacaccagcacagacaggacagatgtatggtactaaaggagaatgcaaccttaaaataagatgggaagggtttcttgtggagggaaaacgattcccattcctaatgtaggcactgcttctgtgtcctcagacacccacagagccttctttcactgactataatattacttacgcatcttgctgcttctcacatacctggacagattcgactgtgcctttcatcttccattgtccatggttcttctcctcgttccaacttggagagtgcatctggtttgctgacttgataacctgtttacgggaaataatagaagacagacacactggattgggctggggtatgtaatgtgagagaatgttacatttaagtaactagacagttttcacatctgaaagtagaggcttctctctcaggaaagggcagattacagtcagaccttaatatctgaaaatttcacatccagggattcaaccaaccatggattgaaaatattttttaaaaaacaataaaaaatacaataataaaaaaaaatacaaagtgcagtggctcttgcctataatccgagcactatgggaggctgacatgaaaccaacatttgaagccaggagtgggagaccagcctgggcaacatagactccatctctacaaaaaaaaaaaaaaattagccaagcatggtggtttgcacctgtaggcatagttcctcaggaggctgaggcaggaggaacacttgaacccagttcaaggctgcagcgagccatgaaggcaccactacattccagcctgagtgaaagaccgagacactgtctctaaagaaaaaataaataaataaattaattaaaacatatagtataacaactatgtacatagcatttacattgtattaagtatcaggcataatttggagatgatttaaagtattcaggaggaggtgtgtgtaggttatatgcaaatacaatgccattttatatgagacttgagcatctgtggatttcatatccatggaaagttgtgaaaccaatccctcttggacactgaggggtgacggtatatccttttatcagaagccagaggatgtgccaaaaatctaatattcagagcactgcagtaacttccaagggtaagcaactgagaaagcaaaggccacagactgggcaccctccaggtgacacagagcagctgtcctcacccattgatagcaggttgctgtagatctccaacatcacatcccggtacaaatccttctgaaaagggcccaggagctgccactcctcccaggtgaactccacagtaacatcctccagtgtcagcaattcctgtaagaaaacagagccttgcttaataggaagtgtttctcttttactgacatgaaaagaaagtgaagggaagttgtcccgctcacattaaacatatagactgcatccatctataagtctattgtattttttaatattgccagagaatctccaagtattctataattgcacagtgccccatttgctcaacaaaaattaaggttttatatcaaatcctctcagtaaaagcgggttttatgtataaattttaattttggtatctattgaccagtcaagaaagtatatgctactgacatctagatatctgatataaattgtttcattcactgttaagccttcccagctaatactagcataagacatagagagacttcagatgctagaaccacaggatactacattcatgtttaattgttaaatggattaaaaaatagaaatgtacagaaaacatgagaaactattaaagagtaaccaaattgggaaaacttattcttggaaacatacattaaatatatatgtatgcacacatacatataaatatatgtttatgtatatatacgtatacagtcacaggtatatgtgtctattaacagaaaggttatattaaatacactgaagagataattagtgagttggaattcacagtaaaaaaaataacagggccaggtgtggtggctcacacctgtaatcccagcactttgggaggctgaggcaggcggatagcttgagctcaggagttcaagaccagcctgggaaacatggtgaaatcctatctctaccaaaaagacaaaaattaaccaggtgcggtggcacacacctgtgatcccagctacttgggagggtgaggtgggaggattgctggagcccaggaagttgaggctgcagtgagctgtgatcatgccactgtactccagcctgggtgacagagtgagaccctatctcaaaaaattaaaataactgaaaaatgaagcagagacacaaagtgacagaaagtatgaaggagactttactaaatatggaagacagagtgaggcctaacatatgcctatacatagtttttgaaatattatattcaaataagagaagcaatttccaaatatctgactgagaaattttcagaactgattaaatatcctataactcaaatttaataaatcaacaaagccaagcagaaaatctgcatctagacacatcagactgaaactattgaacatcagatgcacatataacattatgcaaacaactgttaatagaaggaaaagatgcattaccatcaaaagaaaaataaaatgtcctaacaactgacttccacagaaacaaaagaagcaagaaaagtgcagaataatgtcttcaatgtcctgattctgtggcaattggcaaattgtatggtatggcctagccctgaatgccactggaaaataaattgagaccctcttgtcaactaaactgccactctcctgtctcaacatgacttataatcacatggtagtaggaacttgaggcaggaaagagctaggtgcaaatttgtggggaaaagcaagagagatcagattgttactgtgtctgtacagaaagaagtagacataggagactccattttgttctgtactaagaaaaattcttctgccttgagattctgttaatctatgaccttacccccaaccccgtgctctcggaaacatgtgctgtgtcaaactcagggttaaatggattaagggcggtgcaagatgtgctttgttaaacagatgcttaaaggcagcatgctccttaagagtcatcaccactccctaatctcaagtacccagggacacaaacactgcggaaggccgcagggacctctgcctaggaaagccaggtattgtccaaggtttctccccatgtgatagtctgaaatatggcctcgtgggaagggaaagacctgaccgtcccccagcccgacacccgtaaagggtctgtgctgaggaggattagtataagaggaaggcatgcctcttgcagttgagacaagaggaaggcatctgtctcctgcccgtccctgggcaatggaatgtctcggtataaaacccgattgtatgctccatctactgagataggggaaaaccgccttagggctggaggtgggacattcgggcagcaatactgctttgtaaagcactgagatgtttatgtgtatgcgtatctaaaagcacagcacttaatcctttaccttgtctatgatgcaaagacctttgttcacgtgtttgtctgctgaccctctccccactattgtcttgtgaccctgccacatccccctctcggagaaacacccatgaatgatcaataaatactaagggaactcagaggctggcgggatcctccatatgctgaacgctggttccccgggtccccttatttctttctctatactttgtctctgtgtctttttcttttccaagtctctcgttccaccttacgagaaacacccacaagtgtggaggggcaacccaccccttcacaaattgatgggataatctatccccatataatcacagagattaatacacagagaaaagaacagacttgctgaagtctgcaaattcttaatgctgctgatctcatcacattcgggaattatttcacacgagaaataaatctgtttgaaaaaaaatgtaggtttctacctaatttcatactcaaaaataagtttttcctgtttaaagtccttaccagaaagcaaaagaacctgtggaagcagaagcaaatacgaaatatattcatgttaaaagccataaaggaaaaaaaagggacaaattttatgagaaaaaaaatttaatttctacattgaaaaacagatcataaacaaagctgaaagaaaaatgacaggctaaaaaaaactttgcaataaacaaaagatcaatatatagtagatataagcaactcattagccagtaagaaaaaagtttttttaatgtaaaaatcataaagtcaggcatttcacaagagaaaaaaatccagttggccaagaaatacacaagaaggctttcaacctcacctgtgatgaggaaaatgcaaaataagacaaaagaatattggatcattgaaaattgtataatttgataatgtcatatttttaagtattggcaaagatttaaggcacaaaggactccatgtatcagtttctatgtggcaggcactcatctaaatactttacatagtttaacaatgttttcatgtatgactttagacaaatggaattttatacagtcaatattcttcaattaattgcagtgattattcctttatattctaaaactacaccacctaaggtaggggtgtccaatcttttggcttccctgggccacactggaagaagaaatgcgttgggccatgcataaaatacactaacactaacgatagctggaaaaaaatgcaaaaaattctcattataagaaaatttacaaatttgtgttgggccacattcaaagccatcctgagctgcatgcagcccacaggccacaggttgtacaagcttgatctaaggtgaccaacaggtggaatgtgattccactgaagcaaaagaagtcataataaatgtgtttatatatgcagacacatacataaaacacatggatttataaatacacatatatacagagatgcacacatttcagtgacagcaagtatgtgctaccaaacatttgttgaagcagtataagaggattaggaagaaagttatgaagagggaatctacttttactttttttaccttttttttttttttttttttcgagacggagtttcgctcttgttgcccaggctggagtgcaatggcatgatctcggctcaccacaacctccacctcccggattcaagcgattctcctgtctcagtctcctgagtagctgggattacaggcatgcgccaccacacccagttaattttgtgtttttagtagagatacggtttctccatgttggtcaggctggtcttgaactcccgacctcaggtgacccgcctggttggcctccaaaagtgctgggattacaggcgtgagccactgtgcccggcccggaaatttacttttttaaccagtgtgtacttcatcatcagaatttatttccctgtgaggccaggtgcagtggctcacgcctgtaatcccagcactttgggaggccgaggcgggtggatcacctgaggtcaggagttcgagaccagcctggccaagatggcaaaaccccatctctactaaaaatacaaaaactagccaggcatgcaagtgcacacctgtaatcccagctactcaggaagctgaggcagaagaatcccttgaacccaggacgtggaggttgcagtaagccaagatcacgcactgcactccggcttgggcaacagagtgagattccatctcaaaaaacaaaaaccaaaaaaaaaaaaaaaaaaagaattttttccctttggattccatgagtaatttatgtaattacaaaaaataaaagcaatataagtatgcaagaattggaggtgaaaatgcagaaggatattgtatattctgagatgaggtgaagttatcaaacatggcacccaacgactcaagaccttatcagacaactccctaatgccaaatctgcagttaatgccagttcagccacatgttcaggaaaatggaagctatgcacaccttccattttcctaggtcacttagattttattcctaaataagctcacacagacacgcaagacttgagtgtgtggccttgctttcgtcccctaaaaaaactgtttccactgagtttgcctggtctatttccataggagtctctgaggaaccgtgtaataaacagcagtaagaaatcttctgcctttattagaaagctagttcaaaacactgttcaccatatcacctctgggaagaatagcaaatttttcttgagatctaagtgccatgaaataataatctcctgaggaacctgtctgctttctccccacagtcactgtataacttagtgtgactttcttgtactggctgtcagagacatcagatgcaaactgagagctaaggtaatggaaaggatcttctagtcaggcattattttccaacatcagtcattttgtaggaatcacataaacactatattcctgatcttactttgccatgatgttggagttagatttaaagtttatttctctctagattctgaaatgatttcttacgggtctctacaaatccactatggaataaaggagagaataaaatagagaaaaagtcacctgggcattgatcattttcttctgttgtgggaaatggccagcacctgggatactctgtctttgtctcctctggatctgccttaaatttctatttagaaacttcagtcaccagtgaagggtgtccacagaaatcatatctaggtcctggaatcttcctctttcttcatttacttcttgtctcttcccagggtagccaggacctgtggactgaagagcaaaacaactttcaggggtacattcaccttaacacgtggccctgaatatttgtctctttatttggttctctcaaaccaaggaaacacaagaccctcaatgtaggccaaatgcctttcttcggtgaagtgtggaagtaacatgaagatgaaaggggaggtcacaaaggagaatccacatagcatcatgcctaagcagtaggtaattctcatatcagttttttaaatcaggccatatggatggtgagaaactacattttttcctttatacaatgttactctcacacctctttaaaagtctttatatatatttaaaagtgtttatatacggccaggcatgatggcttacacctgtaatcccagcactttgggaggccgagatgggcagatcacctgaggtcaggagttcgagaccagccttgtcaacatggtgaaacactgtctctactaaaaatagaaaaaattagccaggcatggtggcaggcacctgtaatcccagctactcggagactgaggcaggagaatggcttgaacgcaggaggcgaagtttgcagtgagcccagccattgcactcaagcctgggcgacaaaagcaagactccatctcaaaaaaaaaaaaaaaatgtttatatacacacttcaatatgaagaacaagaaacacatagaaaaaaagagggagacagagaaaaggaatacgagttataaatacaaatttagaaaacaattcaaaaatataaatactgggaaaatagccgcctttatatactaacatacaaaacctgaaacacccataaaaatatgcagtacatttgcaagaggaaggataaaaataggctcttgttaatttgtgcgcagtaatttaaaaacataatgttaaatagaaagcctattcatccgccccccttcacccccaaaaaactttcattttctgcaggttcaagagcatgggttgttgtggaaagccagaggattagaaaactcattgtggaggaggtactcggacctgaaacttttaggaaatgttaacgttcatcaagtctgttccagccaaagtttgagctcaacacacacacacacacacacacacacacacacacacacacacacacacacacacaaaaccagccagggctcttgtgaaaagacttcggctttcacttgtctctagacaaaagaccaccaccccgccagataaaataggaaaacctggaatagacacacacgtacactggattcccttaatgattcatcaatcactaagcctcagattaatccagaatgtgaaacagaagtcacattcgttgacaaaagccaccccatcgattctcaatcactgagccccactggggagtgacccgcgaggaccacaatccctgacctcagtactcttggtcgttgatctattcaggcctttaatcactgaccaccagagcctccatgagggaccccaaagatatcctatcacagacacccaccagggactcctaccagctcccctccaaaaggaaacacccgcccccgcctcccccaacccccgcgctacctccaccatatagcgccaccaacaacgcagacgccctcagaaagctccctcccaccacgtttccacgccctgacccacacactgacctgactctccttggaatcgccgcgacctcttaaaagctgaacttacttccctaaacttcttccacttctgggcccctcgcccaactccctccccctctaaacctccagagacggtcagccgcgtttccatggagagcggaatgcggccttccggcttttcctcaggaggagacgcgtccgcgccggcgtcgcctcgccgctctgggggcggccatctttgagtacgtgacgtacagaaggcacagcggccgggagacgcggtggacggaggcctcttaaactgtccgatttccagacacctcagccctggcagaaaatggagagcttatcagaggcttgagttcacacaggcagacacggcgtgggggtaaagtcctctgaacagacacggaacagaaataagttagtcttctcctcgcaggggacagtgaacggcgcaaacttctcaaaggccagaacccattattaccacaaaggcgcggcatcccttcttagcggttatgatggctgtgacgtctcagctcaatggaaaattaaagtcacctctgggcacctcagtcactattgtaaatgcgaagcgttttagaagccgtataaaaactgaagcaagagagactagaacaaaaaataagcgagcggtgcgttgcaggtaacggagccagagcccttaggggagagcatcatgggggcggccatcttaggggacgttcggtgtccgtacggcagaacatattctctctgagaagcttgcggtggaactggcccatggaaatgtctttagaagagaagaaccacctggctctgttcttgactctggaaaagaatccttttctagaattatttaggttgttgccagattaatttcctttagagagtttccttgcccccacgacttcctatctttaaagccaacaatagtatgtgaaatccctttcatatttgaaaccactgactattgctgctgcatctctccggtttctcctattcttaagtgcttgggcaatccagaataatctcccaatgctaaagtcagctgattaataaacttaattacaatgcagagtcctttttgccatgtaacataaccatgggaattactctggggttgtagatctggctatgatatgatgacactaatgaatattttgcaataaaaacatactattttaaaatatatatatacatatatctttatatatgtatatttctacagaattattacaagttatgtcttatgatggtttcttataagaagcaaggaggaaaaggtccttaacattttcaattgtgttttttttaataataaagcatgcattctaatttacaaaaaccacaataaaggtactttcatcatgtcagtcttgaggctgaacaacacttaacattctttttccttttacctgtctgccttctcccttcccctacactctctataccccaccctccaggctctctgttccatcatcttatgcgtatggcccctttcccctgtgccctcttattacttccatctatcacgcagacacacactgtcactcccctaaacactctagtgttaaacaattgctgctgattgttttttgacaagtgccctatgggtaggagtgttcacataaataaagtcaagccaaatagagaaatactatgagaatagacctattcagcaggctgcaaagcaggcttagtagtgaacattctgtggggatggaggcttttgggtgtttcagagccatttctgccattttcagagccatttctacctcctcaagtgcagatattctgctagggtgcagatattcactgttactgttgttaaaaggtggttgcttttcaaggctaccttgaagctgaggatatggggataggattagggcaagctaaataccacaagctcactgtggccggcattgtagacttaattggccattctagaagaggaactaactggcttctagccagggcctaaaaactagatctagatagccaaaaagattacattaaacttcctctagtgtcccatctatcagattccaatcctgaaggaccaagtcaatctctcttctatttcatctcctttctcccatcttataaaagatctttggaaaactctgtttatttcatatataacagagctgatatttgtatgttttgtggagatgatgtttcatcatgttgcccaggctggtcttgaacttttgggctcaagcaatcctcccacctcgaccttccaaagtgccaggattacaggcataagccaccatgcctgtcttaacatttaatcttttcaaattacttcactatgtattcttttttgttgttgttctttttttctgtttacttcactgtgtattctaagcacaaataagaaattcttatttcctaattattgtttatttccatatatataatatatttttttaataagtttttttttagactgcatctcactctgtcacccaggttggtgcgcagtggtgcaatctcagctcactgcaaactctgtctcccgggttcaagcaattcttctgcctcagcctcccaaatagctgggattacaggtgtaccaccacacccagctaatttttgtatttttagtacagacatggtttcaccatgttgttcatgctggtctcaaacttctgaactcatgtgatccacctgccttggcctccgaaagtgctgggattacaggaatgagctccaacacctggcccatttcctaatatttgtatacacttgctatatttttatttttaccacacataaaaatcaaggcaaatgcaagccatggatcttatacatacaaaggcatgtagaactataatcatatagtgaatattcatgcatactgaggcaggtttttagatgctcagagtctgaaattgcactgcatggtatttccataaaatgtcctggggcatactcggacagaatagctcaagtgcaaattataagcatatattccccaaattgtatcctgtttgaattcatcaaagttgaaatgaaggaaaaaataataagggcagctgtggggaaaagaaagagagatcagactgttaacttgtctatgtagaaagaagtagacaaaagagactccattttgttctatactaagagaaattcttctgccttgagatgctgttaatctgtaaccctagctccaacccagtgcttgcagagacatgtgttgtgttgacagaaggtttaatggttttagggctgcgcaggatgtgctttgtttaaaaagtgcttgaaggcagtatgcttggtaaaagtcatcaccattctccaatctcaagtacccagagacacaatacactgcacaagcccacagggacctctgcctaggaaagccaggtattgccccaggtttctccccatgtgatagcctgagatatggcctcatgggaagggaaagacctgactgtcccccagcccaacacccataaagggtctgtgctgaggaggatcagtaaaagaggaaagcctctttgcagttgagataagaggaaggcatctgtctcctgctcatccctgggaatagaatgtctcggtgtaaaacctgactgtatgttctgtttactgagataggagaaaaccaccttagggctgcaggtgagacatgctggcagcaatactgctctttattgcaccgaaatgtttgtgctcgtgcacatcaaggcacagcagctttccttaaacttatttatgacacagagacctttgttcacatgttctcctgctgaccctctccccactattaccctattgtcctgccacatccccctctccgagatggtagagataatgatcaataaatactgagggaactcagagaccagggccagctgcgcaggtcctccatatgcagagcgccagtccctggggcccccttttctttctctatactttgtctctgtctcttatttcttttcctggtctctcgtcccacctgacgagaaacacccacaggctgtggagggggtggcccccttcaggcagccagagagaaaggtcggcttacccacaaagggaagcccatgtgactaacagcagatctctcagcagaaaccctacaagccagaagagagtgggggccaatattcaacattcttaaagaaaagaactttcatcctagaatttcatatccagccaaactaagcttcctatatgaaggaaaaataaaattctttacagacaagcaaatgctgagagattttgtcaccaccaggcctgccttacaagagctcctgaaggaagcactaaacatggaaaggaacgaccggtaccagccaccacaaaaacatgccaaattataaagaccatagatgctaggaagaaaccacatcaactaacgagcaaaataaccagctaacatcataatgacaggatcaaattcacacataacaatattaaccttaaatgtaaatgggctaaatgctccaattaaaagacacagactggcaaattggatagagtcaggacccatcagtgtgctgtattcaggagacccatctcacgtgcagacacacacatatgctcaaaaaaaaaaaaagggatggaggaagatctaccaagcaaatggaaaacaaaaaaaagcaggggttgcaatcctagtctctgagaaaacagactttaaaccaacaaagatcaaaagagacaaagaaggccattacataatggtaaagggatcaattcaacaagaagagctaactatcctaaatatatatgcacccaatactggagcacccagattcataaagcaagtccttagagacctataaagagacttagactcccacacaataataatgggagactttaacttgccactgtaaacattagacagatcaacgagacagaaagataacaaggatatccaggaattgaactcagctctgcaccaagtggacctaatagacatctaccgaactctccacctcaaatcaacagaatatacatttttcctagcaccacattgcacttattccaaaattgaccacatagttggaagttaagcactcctcagcaaatgtaaaagaacagaacttataacaaactgtctctcagaccacagtgcaatcaaactagagctcaggattaagaaactcactcaaaaccgctcaactacatggaaactgaacaacctgctcctgaatgactactgggtacataacgaaatgaaggcagaaataaagatgttctttgaaaccaatgagaacaaagacacaacataccagaatctcttgacacagttaaagcagtgtatagagggaaatttatagcactaaatgcccacaagagaaagcagaaaagatctaaaattgacaccctaacatcacaattaaaagaactggagaagcaagagcaaacacattcaaaagctagcagaaggcaagaaataactaagatcagagcagaactgacggagatacagacataaaaaacacttcaaaaaatcaatgaatccaggagctggtttttgaaaagatcaacaaaattgatagactgctagcaaaactaataaagaagaaaagagagaagaatcaaatagacacaataaaaaatgataaaggggatatcaccaccgatctccagaaatacaaactaccatcagagaatactataaacacctctacgcaaataaactagaaaacctagaagaaatggataaattcctggacacatacaccctcccaagactaaaccaggaagaagttgaatccctgaatagaccaataacaggctctgaaattgaggcaataattaatagcctaccaaccaaaaaaagtccaggaccagacagatttacagctgaattctaccagaggtacaaagaagagctggtaccattccttctgaaactattccaataaatagaaaaagagggaatcctccctaactcattttatgaggccagcatcatcctgataccaaaggctggcagagacacaacataaaaatagaattttaaaccaatatccctgatgaacatcgatgcaaaaatcctcaataaaatactggcaaatcaaatccagcaatacatcaaaaagcttatccaccaagatcaagttggtgtcatccctgggatgcaaggctggttcaacatacacaaatcaataaacataatccatcacataaacagaacaaaaggcaaaaaccacatgattatctcaatagatgcaaaaaaggcattcgacaaaattcaacagcacttcatgctaaaaactctcaataaactaggtattgatgggatgtatctcaaaataataagagctacttatgacaaacccacagccaatatcatactgaatgggcaaaaactggaagcattccctttgaaaactggcacaagacagggatgccctctctcaccactcctattcaacatagtgttggaagttctggccaggacaatcaagcaggagaaagaaataaagggtattcaattaggaaaagaggaagtcaaattgtccctgtttgcagatgacaagattgtatatttagaaatcccatcgtctcagcccaaaatctccttaagctgataagcaacttcagcaatgtctcaggatacaaaatcaatgtgaaaaatcacaagcattcctatacaccaacaacagacaaacagccaaatcatgagtgaactctcattcataattgttacaaagagaataaaatacctaggaatccaacttataagggatgtgaaggacctcttcaaggagaactacaaaccactgctcaacgaaataaaagaggacacaaacaaatggaagaacattccatgctcatggataggaagaatcaagatcgtgaaaatggccatactgcccaaagtaatttatagattcaataccatccccatcaagctaccaatgactttcttcacagaattggaaaaaactactttaaagttcatatggaaccaaaaaagagcccatattgccaagacaatcctaagccaaaagaacaaagctggaggcatcacgctacctgacttcaaactatactacaaggctacagtaaccaaaagagcacgatactggtaccaaaacagagatatagaccaatggaacagaacagagcccccagaaatagtaccacacatgtacaaccatctgatctttgacaaacatgacaaaaacaagaaatggggaaaggatttcctatttaataaatggtgctgggaaaactggctagccatatatagaaagctgaaactggatcccttccttacaccttatacaaaaattaattcaagatggattaaagacttaaatgttagacctaaaaccataaaaaccctagaaaaaaacctaggcaataccattcaggccacaggcatgggcatggacttcatgactaaaacaccaaaagcaatggcaacaaaagccaaaattgacaaatgggatctaattaaactaaagagcttctgcacagtaaaagagactaccatcagagtgaacaggcaacctacagaatgggagaaaatttttacaacctacccatctgacaaagggctaatatctagaatctacaaagaacttaaacaaatttacaagaaaaaatcaaacaaccctatcaaaaagtgggtgaaggatatgaacagacccttctcaaaagaagacatttatgcagccaacagacacatgaaaaaatgctcatcatcactggccatcagagaaatgcaaatcaaaaccacaatgtgttacaggaaggcagggaccccaaacagagagaccagatggagctgcggcaaaggaacataaattgtgaagatttcactttaatatggacatttatcagttctcaaataatacttttataatttcttatgcctgtctttactgtaatatcttaatcctgttatcttcataagctgaggatgtacgtcacctcaggaccactgtgataattgtgttaacagtggttctgcttttgccctttgccctgtgatctttgttggacccatatcagtggttctacttttgccctttgcccttttccctcagaaagatgtaatctttgttagacccttatcagtggttctgctttttgctctttgaagcatgtgatctttgtacctactctctgttcttacaccccctccccttttgaaacccttaaaaaaaaaacttactggtctgagactcaggcgggcatcacagtcctaccgatatgtgatgtcacccctggaggcccagctgtaaaattcctctctttgtattgtctttatttctcagccggctgacacttatggaaaatagaaagaaactacattgaaatattgggggcaggttcccccaataacaacgagataccatctcacaccagttaaaatggtgatcattaaaaagtcaggaaacaacaggtgctggagaggatgtggagaaatatgaacacttttacactgtttgtgggactgtaaactagttcaaccattgtggaagacagtgtggcgattcctcaaggatctagaactagaaataccacttgacccagccatcccattactgggtatatacccaaaggattataaatcatgctgctataaagacacatgtccatgtatgtttatcgcggcactattcacaatagcaaagacttggaaccaacccaaatgtccatcaatgatagactggattaagaaaatgtggcacatatacaccatggaatactatgcagccataagaaaggatgagttcatatcctttgtagggacatggatgaagctggaaaccatcattctgaacaaactatcacaaggacagaaagccaaacaccacaggttctcactcgtaagtgagaactgaacaatgagaacacttggacacagggtggagaacatcacataccagggcctgtcgtggggtgaggggagtggggagggatagcattaggaaagatacctaatgtaaatgacgagttagtgggtgcagcacaccaacatggcaaatgtatacatatgtaacaaacctgtacattgtgcacatgtaccctagaacttaaagtataataaaaaaaattaaaaaataaaagattaatgggccagggttgtggctcatgtctgtaatcccagcactttgggaggctgaggcaggtggatcaactggggtcagtagttcaagaccatcatggccaacatggcaaaacgtggtctctactaaaaatacaaaatttagccagatgtggtggtgcacacctgtacacacttgtaatctcaactactcaagaggctgaggcataagaatcgcttgaacccggtaggcagaggttacagtgaaccgagatcatgccactgcactccagccctgggccacacagcaagacttcgtctcaaaaaaaaaaaaaagaaaacaagattaatgttccctctgaagaataaacatacatagtggggtattctgcagggtgagtaaagtagaaactttatatattcaacccaaagcatattttgttaattagcactgtggccactccactagaacagagtggaaccccacccacactttgatttggatgctgggactgatgacgtcacatagtgaagtatcatgagaatatttgttacataatgagactctggaaagagcaggagacttcccaagctggttcaaaagtggcttgtgagagcaggaaaatgtgttgtgactatggttaaggagtagggcaagggtaaaggtacccaggcatgtcttgaacttccagcatataccaaagaagggagcactcaggctttattatcaacttgcccaaatagtgtggcttaaaagatgtcagtaatcaatcaaaaaatagattcagattctttaattcaacactgaatgtttactcttgaaactcctgacttctaggttgagaaagacttaatttcctcatgctaaaaaccttatacatgtcctttcttcaagcataaataggaccctttacataactgttgaaagtgcttccgaaatactgcttagacaaattgtctacaatatttttacactagtcttgtgaaaattaatgtttataagactataaaaattgaataacaaaaaagccatttttcaaaaagctgtaaaaatttctgtatgaggttatcataataagcatggcattctataatttctcaactatagcaaaacttcatttctattatttatttatttattatttatttatttattttgagacacagtttcactccagcctgggtgacagagactctgtctcaaaaaaataattgttattattattatacactttcctagaaatcatttaacccaatttatagatttacatttgttcccttgtacttcagtgaaaaacttggaggatccataaatcaaggtggtattttcagatttgtgtggcaaaaaatttgtacagagaggctgggagcggtggctcacacctgtaatcccagcactttgggaggccgaggtgggcagagcacgaagagatcgagaccatcctggctaacatggtgaaaccctgtctctactaaaaatacaaaaaaaattagccaggcgtggtggtgggcgcctatagtcccagcgacttgggaggctgaggcaggagaatggcaagaacccgagaggtggagcttgaagtgagctgagatcgcgccgctgcactccagcctgggcgacagagcgagactctgtctaaaaaaaaaaaaaaaaaaaaaaatatatatatatatatatatacacacacacacacacacacagagaaatgacagatgcaaagcatgtgttctatcaatatgtagaaggtcccttacattttaagttcagtgaaataattagaatgatacaagatactgaactgaaattgtacaatgtggaagcaaaagctctgttactaatgtgcaagtatatcaacaggatttttaaaacacaacatgctaattataccttaaaatatatttctcccagtctgggcaacatgacgaaacctcatctctacaaaaaatacaaaaattagccaggcatggtggcgtgagcctgtgatcctgaggcaggagaacatggtctggaggcaggaaacctaaggctgtttcacgctaacgtccttaagctaaattgatgggaaaaccctaactttccacacctaagtaacaaaaggaccagagactactccctttgcaaacctctaccttttctgcctggcagatgggaaattaaaagtacctctgattggttgctttttgcaaccaatcagatatttgcgtaggagtgtgacttttgtaactttacttcagcctctgattggttgactgactgcaggccaccatttcatttacattaggtcagcaccaagcagccaacgggaaacctctagtagtcatttggacccaagaagattctgtatctgggccactgcttgggcctgttcccacactgtggagtgtactttcattttcaataaattcctgttttcattcttttgatgctgcattctttcattgctttgctgggtgtttcttccaagtctttgttcaaaatgccaagaacctaaacaacttgcagtcaagaccctctactggtaacatattctggtgagctagccaggagagaaggtaggcccaaagtttgggatttctttttctcctttccccttttacatacagggaaatcttcctctctccatcttttcctttccaactgaggaccctcagtggacagcacctaagcacaaagacacttgcaagtttctggccagggccattctctggtgaaactggaaggtttccgtgtggaagtgcctaactgccaccgcttggttaaggtgaggaacctgagtccttttcctcgtttttgtttttctgagtcctattcctttttttttttttctgagttattttccttttctcctttttcagtctttcagcggccgtttcctagtagctcgttggtaattgaggggaactgactggggccactctctggtatcctctgaaggccaaggagtgaacagggatggctgccctgcccagaaagggaaaagactcatttctgtccttttcagttataatccctgatccctatgtgtgatgcagttagcagcagcagctcgtccagggcaaactcacaggtttcaggtgacttatgctgcttttatttatgctaaattcttcccttctcccacccaactggcaaaggacagaaaacccacctagctatgcacaaaaggttacacaagtcagagggtccgggcatgtggtctgtgtggtgcatggtggtggagggaattcatgaaaaggaatttattattgcctaagttgagagcgttaaagggttgttttaagtgagatagaaaaactttaagtcaggtcctcagtgatggagggaaccattccaaagtggtgccagcacccatctaaggtcagagatgtctgacagactaagttggggccctaaaggggggatgccccaggtaaaatttgggtcacctaatgagccctccacttttcaaagtcctcttctcttttccaaaccactatgggcaactctccacctattccacctgattccacacttggctacatcctcaaccatggaaatcaatttgaccctgacactctaaagataaaatgtaaaattttttttgcactattgtctgcccccattatgaactgcccagcctggaacaatgggcagtcttggtagccttaattatgacaccatcctgccattagacctattttgcaagaggcagggcaaatggtcagaaatcccatatgcacaggattttatgaccttataccaaaacctagcaatctgtcaaactcccagaacccacccccaccaccaaaggaaagttctaaggtagaattagatattatagatgatcccccccactcttactttttcttttttgagacagagttttgctctcatcgcccaggctggagtgcaatggcttgatctccgctcactgcaacctccacctcccaggttcaagcaattctcctgcctcagcctcccaggtggctgggattacaggcacacaccaccatgcccatctaattttgtatttttagtagagacggggtttctccatgttggtcaggctggtctcgaactcccgacctcaggtgatctgcccagctcggcctcccaaagtgctgggattacaggcgtgagccaccgtgccaaaccagatgacccccttttacaagagccacttgtctctaagggtgaagagcgaccatccctatagcccccttaccaagtgctcctgaggctaaaaccaggagcaaacactggggaccctactaagtcccccaaacactcagtggggaacaccatattctactctccctccagccttgctaccccgtagggaagcagcaggagccgaatggccagtcctattgcaggtccccttctctataactgatatacagcaatgtaaggaaaagctaggaagctactctaaaaatcctaggaaatttgcagaagggttccaaaagttgaccttattactattgcactccagcctgggcaacagggtggtgacatgataataatgtcaatttacaaagatgatttgagaatcttgtctgtatgcacttaaaaccagctgcaaaacatgtgaagcaacaagtgacagaagtgaaaagaatgtacaaatctaggtggagcacagatttttaggttagtgaaacatactccgtatgtttcccatatcccaaagcaacactgtatttgtcaaaggacactctgaacacaacaagctcagtgacttacattgtaaatttacatcattctccaccatattccatgctgcttaactcacacagtacagtgaccttaatcttccagaaaacatggatatgaaggaaccacacctaatgaagcaggccctctcaccttactgatttattcccagagaccacaatgaaagatgtgtaggaaaggcaagacttcatactttaggatgaaggtcacaaatagtcaactagcctttttaagaaatgtcaaagtgaatacaattattttatatactgaattggccatttccacacacgctcttgatcctttgatgtacatattacctggggttttaacaaattttgtcttgtggttattttaccgtatgtatcattccaggtcaatcctggatggagaagcagacttagttatccatagtatgatttacctaacatggaatctgttgagaaattttttttttttttttttttttgagacggagtcttgctctgtcgcccaggctggagtgcagtggtgcaatctcggctcactgcaagctcagcctcccgggttcaaacaattctcatgcctcagcctcctaagtagctgggactgcaggcacgtgccaccacgcctggctaattatttgtatttttagtagagacggggtttcaccgtgttagccaggatggtctcgatttcctgacctcgtgatctgcctgcctcggcctcccaaagtgctgggattacaggcgtgagccaccgcatctggctgagaaatggtttaaaattttaccacgttaattacatttgcaaggtttctatccagtatgaataatttggtaaagcctgaagacacactactgattaaaggtccttccatgttaagcacactgatatgacttttttcctgtataaattctctcaaactccaaaaacatgaacatttgatttttttatttttttgagacagagtctcactcttgtcacccaggctggagtacaatggcgcaatctcggcttacagcaacctccacatcctggattcaagtgattcttctgcctcagcctcccaagtagcgggattacaggtgcccaccactgcccagctaatttttgtattttttagtagagatggggtttcaccatgctggccaggccggtctcaaactcctgacatcagatgatccacccacctcggcctcccaaagtgctgggattacaggtgtgagccaccatacccagcccatttgatttttaaaaaggcttaccacattcgttacatttgtaagactgttctccagtatgaatactctgatgtttccatttggatgttcgggtaaaaagtcttagcacacacattacatttgtcaaagatgtatattctgaggtctagtgagttcagacacctcggggaagcctctagcacatacatttatacgatttctttccaatataaactctcaagtagtgactgaactctggtgaagcttctgccaccctcatttcatttgtaaagcatatctgcactttgagttatagatccacaagttttgacctttaagtagtattcttgccacatatactacacttctgtgatttctctccaggatgtatattcttatgcctagtgaacacttgcttaaaacttagctatattctggccgggcgcagtggctcacgcctgtaatcccagcactttgggaggccgaggcgggtggatcatgaggtcaggagatcgagaccatcctggctaacaaggtgaaaccccgtctctactaaaaatacaaaaaaaattagccgggcgcggtggcgagcgcctgtagtcccagctactcgggaggctgaggcaggagaatggcgtgaacccaggaagcagagcttgcagtgagccgagattgcgccactgcagtccgcagtcccgcctgggcgacagagcgagactccgtctccaaaaaaaaaaaaaaaaaaaaaaaaaaaaaaaaaaaacttagctatattcactccatgtgtaaatatattaggccataattgcatggctagacagaaatacctgaggctaggtaatgtataaagaggtttaattgactcacaattttgcaggctttataggaaacatggcgctgacgtctgttcaccctctcgggaaacctgaggaaggttaaaatgatggtgggaggtgaagggcatgtcacatggccagaagaacaaacaagagggaggtgccattcactttcgtgcgtgcgtgtgcgtgatggagtctcactctgtcacccaggctagagtgcagtggcgcgatctcggctcactgcaacctccgcctccagggttcaagcaattctcctgactcagcctctcgagtagctggtactaccagtacccgccacgaagcccagctaatttttgtatttttggcagaaacagggtttcaccatgttggccaggctgctcttgaactcctgacctcaagtgatccgcccacctcagcctcccaaagtgctgggattacaggcatgagccagacctcatgagaactatcacaaggacagcaacaaggggatggtactaaaactttcttgagaaagccacccccatcatccaatcacctcccactaggctccacctccaatactggagattactacaattccacatgagacttcaaagggaaaggacaaatatacaagctatatgagtaagtataaattatttggggatcccagaggttaggacaacatctaacggcctttccacattgagtttagttgtaaggttctctccagcatgttttatctgatgtttagtgaggcctgagcgactaatgtaagatttgccacactcattacatttataaggtttttcactagaatgaattcgttggtgtttagtgaggcaagaccgccgcccaaacgccttgccacattccatacatttgtatggcttctctccagtatggtttctctgatggtaaaccaagtttgacctttcgataaaagctttaccacattcattacatttataaggtttctctccagtatgcatcatctgatgattaagcagaattgaacgtactctaaaggctttgccacactcattacatttgtaaggtttctctccagtatgaatactccaatgacgtgcgaggcctgagcgataacggaagaccttgccacattcattacatttgtaaggtttctctccagtatgaattctccgatgccttgccagggttgtagtggagttaaagactttcccacattcaatacatttgtatggcatctctccagtatgtcttctctgatggtacaccagacttgttttatgactaaaagttctaccacattcactacatttgtgtggtttctccccagtaggatttctgtgatatcttgcaagttttgaactttggataaaagcctcaccaaattcattacagtggtaagggttctctccagtatgaattaccagatgtttagtgaggcttgaacgctgagtataggctttgccacaatcattacatttataaggtttctctccggtatgaattttccgatgacgtgctaggcatgagtagtaactgaagaccttgccgcattcgttacactggaaaggtttctctccggtatgacttcgcctatgaattgaaaggtttccactgtcaatgaagaccttgccacacacattacatttgtaaggtttctctccggtatgcattctttgatgacgtgctaggcatgaatagtaagtgaagaccatgccacatttattacaatggagaggtttctctccagtatgacatctcatatgaaccgaaaggtatccaccgtaattaaagaccttgccacacacattacatttgtaaggtttctctccggtatgaattctctgatgtacagttagtaatgagccccaattaaaggctttgccacattcattacatttgtaaggtttctctccagtatgaactctctgatgcactgcaagatgtgaatgttgactgaagaccttgccacattcattacatttgtagggtttctctccagtatgaattctccggtgccctgcaagacgtgaacgttgaaagaagaccttgccacattcattacatttgtaaggtgtctctccagtatgaattatctggtgccttacaagttgtgaattctgataaaagaccttgccacatacatcacatgtatatggtttctttcctgcatggattatatgatgtgcagtgaggcttgagttccgtttaaaggttttgccacattcattacatttgtagggtttgtctccagtatgaactgtctgatgagttgcaagagaggaactttgactaaagcacttcccacatcgattacatttgtaaggtttctctccagtatgaattctctgatgaactgcaaggtgggaacttttactaaaggacttgccacattcattacatatgtagggtttgtctccagtgtgacttctccggtgatttacaagatctgaattttgtctgaagatcctgccacatacatcacattggtatggtttccctcttgtatggactatctgatgtactgttagtagtgagccccgatgaaaggctttaccagactcattgcatctgtaaggtttctctgtagtatgtatcatctgatgattaataagacttgaagacactctgaaggctttgccacactcattacctatgtaaggtttttccctaatatgtgttttctcgtcttgtgtaggtaacgaaagttgcaaaaaatcattcccatatttcctagaaatgttggtttggacaccaggaaaaattctttgaagtggtgaagctaaaaaacaattattaactgtcctctcaatttgattacatccataaattttctctgcagtttgaaatttctgcaattcacccagaccggactgaaaccttaatataagctgattttccatatgcttgttttctacgtccccttgactatgtcgaactctttgaccagtaagattgtttttatgggtcatcggcccttctttataatttatttcaccatctttccattgaaagtcaacttcctgtagatttttccggatttccctgaagtaaaaattttcagtgtcatagctttcatgtccttccaacatcactgcttggaatttttctcctgtgttactgttctgtattggtggtaattccttgatcacacatttaggagagatacctgcaaaatataatgaacatggggttttaaaataactattattggtaaatattattttatactgaaaacacactacgctaaacataatgtttatactagcaagttgtgaaacttttctaccatgatcttctatttgtagaaatgcaaaatgaatagaattctatagtaaagaaaaagtgattacatgtaatttaaatcaattttaggaaagcctagtttcaaacatccttcgaccaaaagactcatgttatgcaaacatatatgagcaccaaaacaagtattttgcaatcgctgaccccaaatgacacaccaattggcagtaaacatatggctccctcataataggagagaaaaaaagttacatatatttatttcatacaaatgaatgccaagcaacagcaagatatactgtaatggtaaatattaactaataaataatcataatataaattaattaataaaacattctaatagcctgtgataaaaccagcaggtaaataatgaacaaccacaaaatacaaatctatagtatgaaattctaaacaattctccatcaataataagcaagaatttatattctagaggcagtatataactagaaaatatgttgagatcactggcttttaaagataaaagaaaggtaaatatgtctatggccataccaccgtgaatgcatctgatcttgtctgatctcagaaactaagcagtgtcagaactggttagtacttggatgagagaaaggtaaatatataaaataataaagaataaaaattggggacaggtcagccgggcacggtggctcaagcctgtaatcccagcactttgggaggccgaggtgggtggatcacgaggtcaggagttcaagactagcttggccaacatggtgaaatctcgtctgtactaaaagtaaaaaaaatcagccgggtgtggtggcacgtgcctgtaatcccagctactccggagcctgagacaggagaatcattggaacccaggaggcggaggttgcagtgagccaagatttcgccactgcactccagcctgggcgacagagcagtctcaaaaaaaaaaaaaaaaatggagacaggtatggtggctcagacctataatcccagcattttgagaggccaaggtgggcagatcacttgaggccaagagtttgagactagccaggccaacatggtgaaacctcatctctactaaaaatataaaacattagccaagcgtggtgatgcatgcctgtaatcccaactactcaggaggctgaagcacgagaatcacataaacctgtaagggggaggttgcagtcagccaagatcacgacactgcacttcagcctgggcaacagagcgagactgcctcaaaaaaagaataaaacttgggaaaggaaatcagaaatctcagttatgatttcatgcctacaactatgtaacaaacaacagagcaagtccctatgtattcattgtctttttttgcttttggctgagatggagtctcactctgtcacccaggctggagtacagtggcatgatcccacctcactgcaacctccaactcacaggctcaagcgatcctcccacctcagcctcctgagagctgggaccacagatgcatgccatcatgcccggttaatttttttgtagttttggtagagatgaggttttgccatgttgcccaggctggtctggaactcctaagctcaaacaatctgcccacctctgcctcccaaagtgctgggattataggcatgagccaccgtgcccagtcctattcactgtctttattatccagttccttggccacaaaatatatatgatacagagattgtacttggaaaatgcatgaactgagataaaagacaacaccgtttggaccaaactgcaaaatgaaaacttacagatacaatgtagactgctctgatataaagacttatgtctgccaaaattcctatgttaaggccccatcctcaatgtgatagtatttggaagtgtggtctttggaaggcaattaggtcaggatggtgcatagaacttcaggaatgcaattagcagaaacgtgaaaaagcctctgctttttgcatgacaatctctctgccacatgagaacacagagtcagccatggcacaccagaaaaaagtccacaccaagaaccaaagtggctggctctgacatgttgaactttgcaccacccagatctgtgaaaagtccatttctgctgtttaaaccaccctatctatggtatctgatatagctagtcatgctgactaaggtaaagccaatatgctatctcattataaacatgaaacaatgttgatacacgttattaaacaaatttgtgagtctgtactataaaacatgcaatattctaagctagctaacagcattaacttgtttaaaaagtctttaggtaaattatcactatttaacaaacaagcacactaaatatgcccacaggatttatgtatctatacccaatttacaaagaaagtaagacacaagaacctgggtttgcaagatcaaacatgttttttaaaaacaacttcccaaacaagcagtgcagataacaggtcaacccaaatatcaagagtgtagaaatacttcaagagccattttgtgtagagcacctgattctgtcgctgttcagggtgccactatgtaacccacatggacctaggaggactgaacaaagggggcgaatgcgggaataaaagacaagagacaaaagagtatatttggaagaaggggtcaggggcaccttgcctgtagtggacaagggccctgagctttacacagccgtccgtatttattaggcaagagagatagtgagaaggatggtggaagaaggggtcagctgcgcagtccagagtaggcttgcaagactgcattcctcaaacaacaggctctagatatggcagtagataaccctggcaccaggaagtgattgcctccagcaaaccttctgtcagcaggagcagtcatgagtttgcccacatcctgcattcatgataaacagtttgctgtttgatcatatagcctccagtggaatgctgagttggtcacgtcccacaggctttggctccctgcaatgctgtgttgccaaaagcattattcagccatccgtcatgaataacgaacggtatctgagtcatcatcccctgcacatattgatttacgcagtgttatcagacagtggtcaagtgaatgagtaggggtcaccccttacagagtgagagtagcatgggaggtgagggagttctgcaataatgggagtataaaattaatatgctagtcagtaactgggtagtccatctggacaaagtaatatgttaggaaaggcccaggaggacaaagggcaagaggggagatcaaggagtaatgagcatggagcagcagggtttgtgcttgaagagctgtgggaatagaattgcacaagaaacagctaaaatcctggctttggaagaaaagagaaactaatgtagaggtagtattgtactgactaatacttaaacatgagaattatactatgggtgcaggacaacaagggaagacaattaaaaaggaggcggtgtgatgatatgggaagaaaacagatttatgtctctataatatttgctatgaaatttatcaaactgaatgtcccataagttctatttccaggtatatgctcaacaaccctacatatcaagagatatgtgaaagactgttcttacaattcaatccttaagaaaaaacctgaaaatggccacgaagaggagatggatgaattcattttgtacacacacaaagacaccacaaaactttactgatagtacaagaacgttaaggagacggggtgcagaatgaggacccgtagcacaacaggcaaagatttgagaaaacaaagaaagcaggagactcttgtcaaggtttaaatatatgttaatggagacacagtatatacgatgaaagtatcctgggatatcaaaaacacaacatggaagcagatctgtaaaaagtcatttctgtatgtaattgaagttaagctgttattagtttaaaataggatgttataaatctaaagtgttttctgtaattgcaacggtaaccacagagaatgtatagaagacacacacaatggaaataaaactatttcaggaaaaaaaaatcaactatataaaaacgaaggcagtaagacaaacagaacaaaaaaatctaaaagagatatagaaagcacttaacacaatggcaatataagtccttttctatcagtaattacattaaatgtaagtgtttatactccacagtcaaaagacagagactggctgaataaatttttaaaactggcttcagctgcacactatccagaaaatactcattttaattcaaaggacacacataggctgaactgaagggatgaaaaaagatatgccctcaaaatgttaaccgaaagacatcagaggtggctaaactgatgtcagccaaaatagactttatgtcaaaactggtacaagagacaaagaagggcattatataatgattaaaaggttaattcactaggaggatataacaatatgtgcctatatagagatcctcaatatgtgaagcaaaattaacgtaactaaagggagaagtagttccacagtaataataagagacttcaatggcctatttttacttataaataggacaatcagacagaagaaaaacaaggaactagagaacctaaactatatatcaagttgaacctaacctatatatgcataacacatcacccaaaaacagtgcaatacaaatttttcagaactgcacatgaaacatttttcaaaagaaatatcggaaaagaaaaaaaattttaaactttttaaagactaaaatcgtaaagcataacttatcccatcataataaaataaaactagagatcaacagcagaagaaaattagattatcaacaaatatgtggaaacaacatactcttaggccggtgtggtggctcacgcctgtaatcccagcaatttgggtggctgaggcaggtggatcacctgaggtcaggagttcgagaccagcctggccaacatagtgaaaccctcagccaagcatggtggcagatgcctgtaatcccagctactcgggaggctgaggcaggagaatcgcttgaacccaggaagtggaggttgcagtgagccgagattgcaccactgcactccagcctggacaacaagagcgtaactccgtctcaaaaaacaaaaacaaacaaacaaggaccatactcttaaacagccaatatgtcaaattagaaatcacaagggaaattttaaaaatctcaaaacaaaggaaaatgaaaatagaacataccaaaacttgtgaatgcaggaaaaacagtgctaagatagaaaatctgcagatataaatgctaacattaaaacagaagatatccaatggaacagaataggaaacccagaaatacagccacacacctacaaccaactgatccttgatagtcaaaaaaaaattgggaaaagacattctattcaataaagggtgctagaaaaactggctagccatatatagaagaatgaaactggactcctatctcttgtcatatacaaaaattaattcaagatgaataacgacttacattaagtcttcaagctacaaaaattctagaagaaaatctaggaaaaacttttctggacaaaatacaagttgttgtttttttttcttttttttttttagagacagggtcttgctctgtcgcccaggctgaagtacagcagtgtgatctcagctcaatgcaacctctgcctactggcttcaagcaattctcttgtctcagcctcccaagtagctgagattacatgcatgtgccaccacacccggctaatttttttgtatttttagtagaaacagggattcaccatgttggtcaggctggtctcgaactcctgacctcagacctcaaaatgatccgcctgcctcagcctcccaaagtgctgggattacaggcatgagccattgctcctggcccaataccagttttttaagagaatttattcttcattgcttgagcatcacgaaaaaaatatataggttttataaatagtagagaagtccctgaagtgtaagaaatgggctaagtttaaaataaagttagatttttaaataatgattcagtataacatgatggacatgaatgtagataggagaatagttattataatacagcatttgttccaagaaagaaaaaaacagtgcaatttgaacaaaacccagcaagctatatttaggaaactgaaacttactacagaaaagcaatgtatgttatataacaaagaacgatcaatctattaaatggtatttccacaattaagatagtaacttaaaaaattatgctcaagatattaaaaatttccaacttaaaaactgtaatcaatttaaccgacaaatatatactttcatagtaggaattaagtcaggtgaaacagaagtaaaaggaataactgatactatcaatacaacattatggagtttctgtaagttttagggaaactgctgctgagctataccatctgtactaaagaaggaaatcttgtaaaatacataaaacaatatgcattccccaacacaacactaccacaatagaaacataaaacaaagaaaactgagtatcctcaaaaatatggaactgattaaataaataaaaacaaagttcatttataatacatgaaaatgcatcagatgaaagcaatggttgcttaaaacgaattttgtggacttaaaaaagataagcctcattcaacttcattagcttcctcaagatcaaagtcgtactcactataaacaaaaatactggggaagaaaagtgtggcatgagcagtggttcaggcaacagccctgcagagatgaagctgtgaacctggacaatgttcttcccgggagaaatttttttttttgagacaaagtctcgctcttgttccccaggctagagtgcatggcgcaatctcagctcactacaacctccgcctcccagatttgagagattctcctgcctcagccccccgagtagctgggattacaggtgcctgccaccacgcccggctaacttttgtatttttagtagagacggggtttcaccaagttggccaggctggtctagaactcctaacctcaggtgatccacccgcctcagcctcccaaagtgctgggattacaggcgttgagccaccgtgcccggcatgggagaaattcctacaccattcactgctagctcaaaaaagaggaccattagtatatgagatcaacattgccacagtacccttgaaagatacttttgtgacatttctcagaaaccaggctcttgtgatggtctctatctgaatatcatgacaaatgctgatcattctactctggctttaatagttacctctgtatgtagcaagatgatgttaaaactcattactcaaagtgctctccttcaaaaattttctcttacccagtaaactcactccatacaatagtccacaagatattcataaccccaagatgggttatcacagcaggaaaaaagcataaaatgtccgaccctagaaatgcatttatccaaagcaagtctcagaggcaaaaaatcacacaaacataaaagagaatgcaagatcagaaagagccaaggcataaacaagacagagaaaaacacaggaattggattgtgagggatcttgaaatgagacagtgctctgtccacagatcccaaactaagagtgtgaagacagagatacgctccctgtgtaggactaagaataaagagaggacctttgtgtcaactgtctttacaattcttatatgtaacaatctcaggagacccaactcattcccgtgtcacaaacccaagaagagtgtccaaagaagaactaagaaaatggctgagggacctgaacaggcagagagggctgaagatagtccagttctaggaccccagcttcaaaggaagggcaaccaatgtttcctcatctcctgaccagcactttcaagtataggaaatggggtggaaccagaaaagttccaggcaccaggactatggagccctcagctccaatctatatggatcagagaactgaggatcagatggaatcaagaacaggaggagagaccacacgggaaagagacttctttgaaaaggcccttcccatgccacagagtcaaagcatcagagttcacacaatacagatgacactgtggtccatcataacagtcttgtactttgctctgtttgagctgcagcaacccctggagagtgaaaggtaaagttatacgtgtctggaaagcaaagtgataagcaggaaagaagaaaacttctggagctcacagaaaatcaaatttgtttccccacagaactctcccacttgcagagtcttacgcacacaatttcatggtaccgcttccattgtgcccatctgagctcttaccggtgatcacgcctttcatgcattccccacagtttgggttcctcgctattttcacttggctcaccacagtccagggctctttcccttgctccaacatggagataatattcaggtcaggaagacagagtcctgcttataaaaaaagaaagaagatgtcccacggtttttccagaacccagcctaatgtctaggtagaagagaaaacactgcagttgaatctacaaaatatttcacaaactcatccattgattgcctccttctgaatgcttagtgaacactgtaagatgaagatatctagctctctcccaagaaatactgaatcaaaaacacagggataggccaagcatactggctcaagcctgtaatctcagcactttgggaggccaagacgggaagatgacttgagcacaggagttcaagatcagcctaggcaacagagtgaaaccctgtctctacctgggcatggtgttgcacacccacagtcccagctacttggaaggctaaggtgggaggatggctttatcccaagaagctaaggttgcagtgtgccaagatcacaagatcacaccactgcactccagcctgggtgacagactgagactgtgtcaaaaaaaaaaaaaaaaagcacaaggatagaaaacaggaagaacagggaattggatatattaactccgccataaggttttacacgtacctcagctctggagtcaccactaatgtacaaagaaggaagcagaatatccatagaaatgggacagttaaaggccagatgcagcattatgaagctttttatttgtgaatcaacaaggcttcagtctctgtcaaataatgtagggcctcacaagaaacacaataaggaaagtacaaaaatgcacaagggaagatcctaacttctggaggaaaactatcctcacccaggaagccgaggttcctgtagttctccaacatcacgtccctgtacaaagctttctgaacagggtccaggcatttccactcctcctgagagaattctacagccacatccctgaatgtcaaagatccctgaaatgaaaaacacatttcaatatgagcagtgggtgagctcttatctttacataaaatgagaagaggagagaactgtcacatcaatttgattgaagtgtgttttgacatatccattaaaagtatctgtgagataattacgtctccctgattttgggttttataaaattcaataggagattaggatattatctaaatcggtgcacatttctcacttttgtggacaaaataagaaataaacacatggttatccctatgaaagttttagatattacatttgttacaccaagtgaggtgtccagatgagctagaatacaagtggtgtcttcagagatgacaatgttcttagtggctttaaagaaaggtcagaaactaaaaacagcgatgacaagagcaacagcaagaactaaagttttggaacactccccatgtaccgggcattacttcaaaggatttacgtgttctaactcaaatgatgacataatcacctatgacagaaatatttcttcccatcttactagaagacaactgtgtcacagacaggctaagaaagtcacctaggtcaacaacctgcaaacagcagagcaagcacctgaacccagatgtctaaaaattagagttgaatcaacagaatccgacagttatattacagagtatgtcctagtctttctgtgtggctataacgaaataagagagactaactaacttatgaacaacagaaatgtatttctcatgattctgctggctggggaatccaagatcaaggtgtcagcaggactgatgtcgctgagggctaatccctgcttcgaagatggtcttgttgctgcataggggacgaatgctacagtatactgacagagggttgcctgagaaaacttgaagcaagttcaagattaacttggaaccgcataaaggatcattatataggctaggcgtggtggctcacacctccatcttagcaccttgggaggccaagatgggtggatcatgaggtcaagagatcgagatcatcctggccaatatggtgaaaccccatctctactaaaaatacaaaaattagctgggcgtggtggtgtgcacctgtagtcccagctactggggaggctgacacagaattacttgaacctgggaggtggaggttgcagtgggccgagatcatgccactgcactccagcctggagacagagtgagaccccatctcaaaaacaaagaaaaaaaagatcatcatataagcacacagaagcacacacataatacattactattcataaaactaatccattcacatgataatatagaaggcaattttaaaaattaagcaaatcactgggacaaagaaatatgtaaaaaagtttttataatcccagcactttgggaggccgaggtgggcggatcacaaggtcaggagatcgagaccatcctggctaacacggtgaaaccctgtctctactaaaaatacaaaaaattagccgggtgtggtggccggcgcctgtaatcccagctactcgggaggctgaggcaggagaatggcatgaacccgggaagcagggcttgcagtgagccgagatcgcaccactgcactccagcctgggtgacagagcaagactccatctcggaaaaaaaaaaaaaaaaagtttttaaagaaaaaacattttaaggccatagaaacatttaagatataattttcaatagtgttcccaagcctgtatcttatgtagagaaaagaaaaaaattaaaataaaaccaagtaaataatttcaactgtgaaaagataataggctgatttatgaaatgatgatgttgtaaataaaaaccaaagcatacaaacatttaaattaactgaaataagacgctatctctcaatgacatattttttggatgactttttaaatcattattcttagacatgtatgttttagcatgcttgggacaatgaaaatgtataaattgtatttcatttactttgtacttagtacttcatttacttatttacttagtacttcatttacttatttattttgtacttattcaatactaggctggagaaaatggtacaaaattttaaaagtatataaacttttattacaattactattaaatgcctatatttaaatatctaagtgcaattttatccagttaaatttagctacttatgcattaacaaaagccaaatggagtttattcgtttattccaccaataaataaaacagtgattcaagattaggtggtttataagtgtaatacattaaaatttaacagattaagatagaaacaatatgtattgcagcagtatatgcttgcataaattattagaaaatttaaaaatcatgttgcaaaggaaatctgtaaaaaaaaaaaaaaaaaaaaaacccaaaaactgttaaggaaaaatatttcacccaacaagtgaaacactggattcatttcctctaaattaagtaagagaaaagggggtttttcatttcctctaaattaagagaaaagggggttggccagacctcctgtcattcaccactgcactggatgtctgagcagcagcaaagagaaaaggtgggagggaaaaaggcaaggagggggtagagccaaagagttagatctactaaaattaagagataacatgattgtggccgggcacggtggctcatacctgtaattccagcactttgggaggccaaggcgggaggatcacctgaggttgggagttcaagaccagcctgaccaacatggagaaatcccgtctctactaaaaatacaaaattagccgagcatggtggcacatgcctgtaatcccagctactagggaggctgagccaggaggatcgcttgaacctgggaggcggaggttgcggtgagctgagatcgcactattgtactccagcctgggcaacaagagcgaaactccatctcagggaaaaaaaaaaaaaaaaaaagagataacatgattgcaacccagaaaaagaatgtttaagtatacaagctaacaatgctaacaatgtactgaaataatcttcctactttagtaacactaatttaaaaacaacacacacacttctaaattttcattagcatatataccatggcacttaagtacaatacattttcagaattatgtgaacaaattataaaactacactgagtgatgtcggcaagataaaggaacaggaatccccaaactctccagtcaccacagtgaaatgattttaacaacaattcatggactaattgcctcggggataaatccagaaaacagttaggaggtttctacacctcaggctgacataaagcaaacagtatagaagctctgaaggaaaatttgaagcatccacttgacagagatccagcccctgccatgcactggggtaacagaaaagaaacccacaactcccaagatcatctaggggatggaaaggagcagaatatctgtccaacttcctgacttttcagatgaccaactgatgggctggtttctctcttcctgaatataagcactgacaagaacaaggtgaaaggttaggggccactgagaaaaaggatgatttacataaaccagtgtgtgcagtaacacagacaaacgctaagtgcatatctagtactacagcttactgtagcaccaaagtctgcaatatcaaagacagacaacaggggagcttctgggtagaaactagcaaacattttcaatgaagagatgacaagcaaaggcccagagaggacaaaatccccagccagaaaaggtgtggaaggtctccacaatctagctgagttgactccagagtgtcctccctgaacaaagcaaccacccaaaactggggaggtagatgatttttaaaatagggaagtgccaaaagaagataataaaacttacaaagaaataggaaaatacagtccataaaaagaaaccaattaagtctctacaaacctacactaaagaaatggtgatttaaatcttggctttgaagaactaaaaggaaatggggatcaccctcagtatatgcagaggattggttccaagattccctaaggggaccaaaatctatggatactgaagtcccttatataaaaaggcatagtatttgcatataacctacctatatcttcccatatgatttaaatcatctctacattacttataatagctaatacaatgtaaatgctacataagtagttgttatactgcattgtttaggaaataatgacaagaaaaaaaggaccatacgtgttcaacacagatgaaaccatccatttttttctggctatttgtagttcatagttggctccatctatggctgcacgagccatgaatacagagggctgactatatgtgaattaccaaagaatttgaaatagcagccacaagaatgctcaatgagttaaaagatagcacacacagacaagctcacgaaatcaggaaaactatatgaactatgcatgcaaagaagaatatcaacagaaatagaagctataaagaaaaatcaaaaagaaattctaaggctgggcaccgtggctcacgcctgtaattccaacactctgggagcccaagatggggtaattgcttaagcccaggagttctgagaccagccagggcaacatggcaaaatcccatctctacaaagagtacaaaaattaggcaggtgtgatggtgcatgcctgtagtcccagctactcaggaggctgaagtgggaggttcatttgaacccgggaggcagaggatacagtgatccaagatcgtgccactgcactccagcctgggaaagagtgaaaccctgcctgaaaacaaaacaaaagaaagaaaaaaagtcgagttaaaaatacaataactgagttgaaaaattcgctagatgaattcaacagctgacttaatgaggcagaagaaggaatcagtgaactcaaaggggattttgacacggaggaaaacaaaaactataaaaaataaagaaaaataaagagagtctaaagggctcatggggaaaccatcaagcatcaagaacgtatgtatcctgaaagcccaataaataatgtgaatatacctaacattactaaactgtaagcaaacaaacaagctttactgaaagacataataaagatatgatcactgactgacaaactcaattcttataggaagatgtgatggtgacaagacctgcgactgtaaaaattcatggccattcaaacacaaacaaaatatgtgggaatttaataaaatgtgactgttgtataaaaaaagaaccaacaaaattttggaaagaaaatggagaggtttgccaatcttcatatgaacctattatgacatttataatctgaaactttaaaagcaatcaaatataatctacaaaaagatatacacaaaaattcaaattaaagattcaatcaaaaaaattcatgcaaagaaaatgtaagcaagaaacatgagattttaaagaaacttcatattttataatcacaccgtgagccaggccttccagaagataaaacaaacatttacttatttttgcttttgtggtataccatcctaaaagaagcaatcattctttgaactgccattgaagtaaccctcagacacttgtggtgaagacagcatgcacagaggaagccacagtgacattctttgcaaaaatgaaaaattgtaaaagatccatatgtcttcatttagaaattgctccaaagaggatgcaaaatacgctattagtgtttattaacataaaaacatgtacatttcaggctgggcacggtggctgacacctgtaatcccagcactttgggaggctgaggcaggcggatcactaggtcaggagatcgagaccatcctggttaacacggtgaaaccccatctcaactaaaaatacaaaaaattaactgggcacagtggtaggtgcctgtagtcccagctactcaggaggctgaggcaggagaatggtgtgaacccgggaggcggagtttgcagtgagctgagattgcgtcactgcactccagcctgggcgacagagcaagactccgtctcaaaaaaaaaaaaaaaatgtacatttcaaaaacttgcaaaatacagcagaacattcacttaagaattgttttctaaaatctcataatgacgtgtaaatgcatcttgacacctctcactgactcttgccacagaacttacaatagtagctcctcaatgaaacatgaggcatggtggagaatgtgacagggaaaaggaacctgggttcctctgggtgggtaattgaaagagtgattgcctcttctaggatggtgcatttcctattttggtgaatctggcaagattccccactaccccaagttcaagggtgccccctcccaccaatgacacatgacatgtcccactctttaaaaaaaaaaaaaaaaatactactatgttcttttttctctttgaggatctaaaaaaaataaaaattctttgtatttccattttccaattccttggactgtgaggacatttcattattttgtggaaatcaaaataaaataattttcattttatgctcaattttcttttactgcattctaggagctatttcatgttctgtagttaaaagtttttaaatatatatgccttgatgttctttttttaggttatgaagggtgttcttgatgccctgttttttacttgtttgcttacaaattttattgtgtatatttaaggtacacaatatagcaaggtatagatagtaaaaaactcacgacagtttaacaaattagtatatccgtatctcatagttaccttttttttttttttgcttttgtggcaaaaacagctaaaatctcatttagcataaatttcacatataataacacgttattccctaccatccttatgttgcatcaccttcttaatgtctaaattccatctctgcttggacttttaccacaaaacaaatatatatatcatgtgatgtttaaaataaatgtaatatttaataataattggtggaatgacagaatttggctccatcttctctgacatcaaaaaagtttggctcttacatctgagcaaaattataaccgttttacaaaaaacaactgccggtaagagtcccagcaggaacaccacattctctgtgggatggatatgctgagaatggctaaattaatctgacattcaggttgatttcatattttaaaatcaatgatggaataaaacaacctctatcactgatgtctgtacctagttttccattccattcccggtcattaagattgtggagttagaaagagtgactgattcattatagcttcaaatgtggtataaaatcaggcagaaaagatctccccttagaggcatcttttcaagaatttatgaggtatttttgcatattaacatgtgacttccacatacagcttctctactcctggtctactgagagctgacagtgcattcagatgttgcccctaaacaatctctgctgcccaaaagctgacaccacagaactcacaccctgtctccatccatgtctgggtgtgagcccttcccaggaccatgcccagtggagcctcttcccaagctcatgtcactgagtcactgtgagatctggaatctaagtgcagaagagagggactgaaggaaggcatgggtgagtgcgagcaaatgtgtcaggcaggatacttcagactcagagaagatttgcagctccaatgccctgcatttcaaaaagggaggagacagaacaatccaccaagattatcactttacctgaggaagagccatccctggctccttttctttcttctttctctcctgggcctctctctcagtcaatataattaattctttaaaagtcaaatctgaaagtcaaaaatatgttgtttaatccttggaaacaacacattcctttctgtgccacaaccatgcccacagggaaggcctcagcatgtggagagacagcccagtgcaccagggggatgcaagcataataaactcctacacaaagaccaagtaagtttttcacccttttcttcagaacttgttcccctcccagagaagcccccacacaccctgcaacagtggggagctgggctggactatgcttcccttcaggacacagacccatccctgatcaaaccccatacagagcacagccccctcacctccctgtggatcacaggctgagctcagctctcagaaacagaagacacaaaggctggacgctcaatgctggatacaaattagaatcaatttgggtactttaaacaatatggaggttgagtccatcctacctactggaagtggaatctatggtaaaagggcacaaaacgtgtatttgcaaactgcctcagcacgctaatgtgaagccagggttgaacacatcttaaagggggcaagactagcacagccccatcctcccagctctgctgtccccttggggcttcactgttaccagtttgtagacagtagaacacaatggaccagaaacacagagacacataatatgcaccaggggtggggtgagggtgtggctggagtgttaaatggtgagaggagggtgaggcacagaagtcccaatggagaaggtgatatcagaacaaagacctcaagaaggaaggatgtttgcacctgcagctgaggggccagacagcccaggtagaggccctgaggcaggagcaacctcagcccagggaacaggaaagaggcctgtgtggctggagcagagggagcaggaaggacacagggaggagatgaggtcagagaggttctggggagcagattaggtagagatgaggtattcaaacatctttctcccacagctcacagtaatttcagaaactatgcatttcctcaccctttttaagtaaacataacttttctttatcacatgaattaaagcacttctttttaatgtcatgttttctctgtttcaaatatatgctgacatgtaaagctaaagccaggaagtacagggtcaccatcatctgagatgtgcaggagtgcaggggaatgtacttggtgagttcaggcaatcacttttggtggagatacctgttagatggctaagcagagagaggagaggacaaaaggacacagaattctagagttcaggggacaggtctgcaggggacatggagacgtgtaggtgggtaggtgggtgatatggatcagctctgtgtccctggcccaaatctcacactgaattgtaatccccactgttactggtggggcctggtgggaggtggatggatcatgggggtggatttgtgatgaatggtttcacaccaccccttggtgctgttcttatcatagtgagttctcacgacatctggttgtttagaagtgtgtagcgcctcccccctcactctctcttgctcctgctcccgccatgtgagacgcctgttcctccttcacctgccatgactggaatcttcttgcagcctccccagaagcagatgtcgccatgcttcctgtgcagcctgcagaactgtgagccaattaaacctgttttctttataaattacccagtctccagtatttcattatagcaattcaagaatggactaatacagtggggtttaaattcataagatgagatgatgaggaaagacagtgggtgtggacagaaacaagaagaggttcaaggactaagccatgagtcattcccacattgggaaacattcagagtcaggacacagcagcagaggaaagtgtgaaatggtcagggaggtgacaagaaaatcaaatagctcctgacaggcaaagaaagagtaaagcaggaaatgaaatacattggatttagaaatggggaggtcactggtgactctgaaaaataaagttatcagtggaatggtggatatgaaagtttcatccaatgcattcaagacacaattggaggcaacaagtgaagacagagactctgaacaagattgtattgtattatggtcttaaatgaagcacagaagaggggtactcactacaggcagaaacacagttaatggtatgttttgttttaattagggcacagtggaaggaaactagaggctttagggtctgtgtgtgtgcatgcatttaatgggcaatacaccaccatcagtaaacactgtttaaagtaattctgtagaagtaaaaatgaatgacacagttaaacaaattttatggaagcccaaagtattttcgttgttttctttttaacttatattttaagttcaggggtacatgtgcaggacgtgcaggctggttacataggtaaatgggtcatggggatgtgttgtacacattatttcatcatccgggtattaagcctagtattcataagttatttttcctgatcatctccctcctcccaccttccactctcaggtagatcccagtgtgtgttgtttccctctatgtgtccaagtattctcatcatttacctcccacttgtaagtgagaacatgcagtatttggttttctgttcccgtgttagtttgctaaggataatggcctccagctccatccatgtcctgggaaaggacatgatctcattgttttttatgggaaggctgttgttttggactagcctcccgaactaccagaccaagccagaatgaagtctcttgtgctgagtgccacattatcaaactgaaccttgaaatgggccaggtttaggggaaaaaaaactccaaaaaataaacagagaggcccggcgcggtggctcacacttgtaatcccagcactttgggaggctgaggtgggcaaatcacctgaggtcaggagattgagaccagcctggccaacgtggtgaaaccccgtctctactaaaaatacaaaaattagctgggcacggtggtccatgcctgtaatgaccccacccccgaatactggcaccactatctactaaaacagatatcttcaatgatgcacacatgccccaatgagaccccaacatcttccaaggaaactctccatattgacatttagataatgcatccaaaatgcatctataaccatcttaacgtgcagcccaaaatactccaaaaaaaaaaaaaaaaacaaaggtagcccccctaaatgatctctgtgattttccagataatacttcggtaagttgcatgattcctgcactcccaaaagaccccgcagaagtcaccatgaaaagtgcttatggcagtacagttctgggttccacgctctcaagaccaacgaaccaaccctccagctgcccaacctccctgtggactccacttaggccttgcttctcacttcagttgacgatagaacaatatgagtttggattgtatgggtccatttataaaagaatttacttcaataaacatctgaaaaatattttgaagacttgcaacaatttgaaaaaactcacagatgaaccatgtaccctaattaagaaaaaggtatgccagaaatgcataaaatatatgtaactattagtctattttatcacttagtaccataaaacacacacaaatctattctaagttaaaatgtaccaaatttatataaacacctctagactgtatatggttccatctacagtcaaaataaatgtaaaaaaatgtaaagacgcagtattcaatcataactgcattaatgaactgtactacatactgaacttctataataatttcatagccacctcccattgctattgtggtgagctcaggtacctgcttaatgtgccccgtgatgttaatcatctccatgtgaactgttaatctctctagtaaattgcagaccgcagtaaaaattgatctctgtggttctggcacatttttcattgtttggtgcaatacgataaactctgaataacaacacaggacccatctgaagtgccactagtgatgctggaagtgctcccaagaagtagagaaaagccatgacattataagaacatgttgacttgcttaatacgtaccatagattgaggtgtgcgattcagttgcccgccatttcaagataaattaatctggtgtaaggaccactgttaaaagagaaaattcatgaagccgtcactgcagctacaccagtaggcacgaaaacaatgtactttttgctaaataccttttttatctcatattgaaaatgcagctttatacaggggcaaaatcactataatgaaggcatacctgtagactctaatatgatttgagaaaaagggaagttattttatgacaactttaggaaggtaaaggatctaaagctggagagtttgatgccagcaaaatatggactgataatttaagaagtttggcttaaaaaatgtcaagataacagaagcagccactccaaccaagaggcagtagatggggtcccaaatgctatgaagaaaatcattaatgagccaggcatgattgctcacccctgtaatcccagcactgtggaaggccaaggtgggcaggtcactagagcccagaagttccagaccagactgggcaacatggcaaaaccccgagtctactaaaaaatacaaaaaaaaacagccggacatggtgacacacgcttgtagtttcagctactcgggaggctgaggtgagaggatgccttcagcccgggaggcggacattacagtgagccgaggtcacatcactgcactccagcctgagcaaccgagcaaaaaataaagaaactgtggcattccaaaatgatccatgcacaaccactcataatcccacttccaagtgcttctgccagacctaagaaattcctttccaagagttccacataccccttgctcttataaccacacttgggacaggtgcacacaccataccatggctcatctgaaggcccacccttgctttctggagccttctatggactcccctccattttcccccatttttctacctctcctccatgcatgcatgaacaaactaggctaaaaggtacaggatctctgggcacatgcaacacagcaggagtgtacacaaactgcaaactgaaggaccctgggccttcagtatgaagaccacaaagttgggcctgctgagaaaacttgccagcaagtgctgacaatattaagtctagtttaaaggcagctgggcattggctagattaagttcagtgaggatgtctcagaagaggggccctaaatctttctatacactaaagacaaaatatctgaaaaaagaaataaagaaaacagtcctatttgtaatagcatcaaaaggaataaaatacttaggaacagatttaaccagtgaagtaaaagatctgtacactgaaagctcttaagacactgataaaagatattgaagaggccaggaaagtggctcatgcctgtaatcccagtgctttgggaggctgaggtgggaggattgcttgaggtcaggagtttgagaccagcctgggcaacatagtgagactctttctctacaaagaaaagaaattagccaggtatggtggtgcatacctgtagtcttagcccttcacccaggtatggtcgtgcatacctatagtcttagctacctgggagcctgaggcaggagggttgcctgagcccaggagttcaaacctgcagtgaggtatgatcgccccactgcatgccagcactccagcttgagtaacaatgtgaggctggtctcttaaaaaaagaaagaaagaaagaaagaaggaaggaaggaaggaaggaaggaaagaaagaaagaaagaaagaaagaaagaaagaaagaaagaaagaaagaaagagaaagaaagaaagaaaaaagaaaggactgtagagagccaaaagccaaagggtcatgaccaactctgcattccactgaaggctatatgattaaacagcaaactgtttatcatgaatgcaggatgtgggcaaactcacatctgccctgccgccagaaggtatgctgagtgcaattactccctggcaccatgctccttgaggttatctactgaaacatctggaggctactgttcagagaatgcagtcgtgcaagcctgcaccaagtcaagcagctgactgacaaccacccgcttctccctatctcctttactcaataaatatgaagggctctaaaagctcaggactcttgctcactagaagcaaggagcccctgaccccttcttccaaatatactcttttgtctttgtctttattcctgtgtccgtccccctttgttcagtccacaggcattggggctgcaacaaaggataaaaaaaacattgaagaacacacaaagaaatggaaagctatcccatgttcatagattgtaagaatattttaaaatgattaaaatgtccatactaccaaaagtgatctgcaaattcagcacaatccctatcaacactccaatgctatttttcacagataaaaaaagaaaaaaccctaaaacttttatacaaccacaaaaaactccaaagagccaaagcagtgttgaaaaagaacatgctagaggcatcatactttctgatttcaaactatattataaaggtacagcaatcctaacagtataatactggcataaaaacacacagagaacaatcaaacacaagagagcccagaaataaacatgcacatatacaactagcctttgacaagggcaccaagaatatacaatgaggaaaggacagtctcatcaataaatcctgtcgggaaaactgtatattcacattcaaaagaatatgaaactggacccttatctcacactatatgcaaagataaactcaaaatagattaaagatttaaatatatgatctaaaaccgtaaaaccccagaaaatagaaaaaaagctccttgacattgatcttggcaatgatttttttggatatgacaccaaaagcccaggcaacaaatggtgggactacatcaaactaaaaagtgggactatgtccaactaaaaagtttggccaggcgcagtggctcatgcctgtaatcccagcactttgggacgccaagacaggcagagcacttgaggtcaggagttcgagaccagcctggccaacatggtgagaccctgtctctactaaaaaattagctgggagtggtggtgcaacctgtaataccagctactacgggggctgaggcaggagaatcatttgaactcggaaggcacacattgcagtgaactgagattgagccaccacactctagcctgggcaacagagtgagactccattttgggggtggggtgggggaggggcaaagctcctgcacaccaaaggaaacaatgaactaaatgaaaaagcaatttgtaagatggaagtatgtatctgcaaaccatatatttaataagtggttaatatccaaaatatataaaaactcctacaattctacagcaaaataccccaaataatctcaataaaaatgggcaaaggacctgaacattttccaaataagacatacaaatgaccaacaggtatataataagatgctcaagatcactaatcatcagaggaatgctaatcaaaaccaccataagctatcacctcatacctcttacgaaggctattttaaataggcaagagataacaggtgttagcatgatatggagaaaaatgagcccttgtacactgttgctgggagtgtacatcagtacagccattatgaaaaacactatggacattcttcaaaatattaaaaatagaacaacaatgcaatccagcaatcccatttctgggtatatatccaaaggaaataaatgaaaccagtatctttaagagacatctaggccaggcatagcagttcatggctgtaatcccagcactctgagaagctgaggcgacaagatcacttgacaccagtagttagagatcatgctggacaacatagcagagaccatgtatctgctgaaaaaacacagacaaaaacaaaaaaatggctgggtgtggcggctcacgcctgtaatcctaacactttgggaggccaaggcgggcagatcacgaggtcaggagttcgagaccagcctggccaacatggtgaaaccctgtctctactaaaaacacaaaaagctgggcgtggtggcgggtgcctgtaatatcagctactcgggaggctgaggcaggagaatcatttgaacctaggaagtggaggttgtagtgagctgagattgcaccattgcactccagcctggacaacagggtgaggctctgtctcaaaaaaaaagaaaaccttacaaaatatctgtcccccatgatcactacagtattattcataacagccaagatatggaaacaacccaagtgcccatccatgaataaatatgtgtgtatatagacatatacagagtgttcatgtgtacatatatataatggaatattatccaaccctaaaaagaagaaaatcctgctatttgcaacaacatggatgaacctggaagacattatgctaggtgaaataagacagacactaaaagacaattactgtatgacctcacaagtggaatctaaaaaagtccaattgatagtaacagggtagaacagttgttgccacaggctgctggggggtgaaaatggaaaatgttggttaaagggtacaaattttctgttataaaatgaagaagttctgaggaagctaatgtacaccatggtgactatactatattggacactttaacagtttggaaagtttttgaaaaatctaataaattatggggtaaaagttcaaaaaatgatggcacttaatattcagaaatgaatgagatcagctgattattggatgccaccaaatcttatttctggagttagcaactataggaaagaagcaattgaataaaatgtatctcaagcttccaaaataacaattaattaactgtaaagcaactacaaagaaaaaagtaaattcattacaaaaaaacaagactttcaatgcttctgcgaagacataccttgtaggcctagtgtggtggctcacatctgtaattccagtgcgttgagaggctgaggtggaaagactgcttgaggccaggaagtagaagctgcagtgagccgagatcatgccactgctctccagcctaggcggcagagagagaccatgtccccccccaaaacaaaacagaacaaagccaaaaaaaacaccaaagacatatcttgtagtgacagtcagtcatttcttgccccatttctcccctcctttatgctctactccatcattgggaagaagagagttaccacaaataactggatcaagtcactgccctctggctaaataggaattccaaatatcttttgatacaaatacatacaaaatgcacaaggcttatagaaaaaactttggtgattttcatcctcatgagtacaacttaaacatatttcaaatcagagtataaagccacaaatcaatatattacaaccaccatccatatccaatcaactgtcacgcatctggatggggtcctctcccgctttcttcacggctatgtgtttccctctctcattctgagcgtcttttttttctccttttctgttttgcacccctttctttattccctcttttatgtctgttctgcccaatgctctgcaacttacttcacctctcgtagctctttctccccaatctttccgattgtccccaatctccacgtatttctgcctcttttcccccatctaagctccctctctgctctccttgttaaattccctcttccctgttacatctcctttgttcccactctctagcacccccaatttcctaggcttactccctgctgtggttctccctctactctgcttgtcacccactgccctctctccctctctttcagtcccagcaccacgtagctctgtcagccgcggctccaactctttcaccttctccccactgtctgtctgtctgcagtgcctcctcctttgccgccccactctattttgctgcccttcatctctctgaaggtcccctttttttctaaatttctctgtgtgcttttctccccctgctactttttccatccgttctctttcactcttgctctctttgcaagtccctaaagtatcatccattttgccgtgtatttatgggtctccctcattcttttctcctcagtttttccttttgctccgtcgttccccgtcttttcctctcctgatccctctcacccacacattcgggaggaaaggggaggaataggatgcccacctcccggaagagcacattttccagtggagtaaaatttgggaaggaagaacactgggtgtcacaagacagactcaggtaacctgtcccaacggggagtcaagaaaagcagtggctgtgaaggggaagcctggggagcggaaggacccggcgtgaggacgacacgaggtggcgcggagaacgatgtctcacgacagggagggtctgcagaatcccaggacgtgggaggagaagcggctccttcaggagccggacagtgggcgctcccctccaggggcagacgacggaggagctcggggatcgcgaagggcgctagtccacatcccgaatgaggactcgacttggcgcggggcccaagcagagggttttaagcgggaacactacctgaatggggttgtctacatggtcctaaggaagaaaggcagagagcaaggaacggcctcagagagattttaaaccgaaagggaagcaattctcctacttacttgggacgaaggggctgttgcgggtattttaaggtccgtagcgatccccaggtcacgggtatggagaaccgaggactgcgaagtgcacgtttaatcaaggtagacgaagagaagcaaacgtttaatccaggtagactgaaacacactcatagcgacgtggcctttccccagcgcgatctgcttccgggtgtgcaggaaactgggcgcggaaagaaaaactgggcggcctgggggcggggcctaggcggggcgcgactaggaaagggctgggcggaaagactggcctgacttgggagtggcccgaaagggtggtgggaggcccagggcggtagggggcgtgactaggtggggcttggctggaccgaaaactgggatgaagcggggcctccaggggtgggcggggccgaggcggggcctgttctccactccgcctctcacccagcaggattttgttttccaggtttgggagtatttgtgactatttcttgtcctgtgaagcagcgttgctccttgcccattttaaattaatgtttcagaatttaaggttgaatcttaaagttgtggtccacttatactggaaactaagatgatttattcttaacaagttgaactgatttaagtcaaaaccgatttttccgagcctggtggactccatccagtcttaccagaaaagctgaagctactcagtagtcagggaactgggatctcggtggggattggatgtggagcagtgactggatccaggaacccagaagacattatgccaagcgaaatgtgctagacacagtgtagaaaatgaaataagtagaggttcctcttcaaagggactttcctcccagtctaattgagaatagatagtaacctctcttagaagcaaaatttactcaaagacctgtgctaatattcttaaatatctgctagccataatagataaatcaatatactctgtgttcttagctcccacattttagcctagatatttgccctggcatgcctgaattgttccaagcaagcattaggtcacagcctattcctcttccttatttggaagtgtttttgcctctctcagccttccacaagttacttcctctcttcctttgttctcctctgcctttgcctcttttgggaagttctaaggtgctagccaatcaggtcaagcacagaattgggtccgattccagccaatggaaaccagacacagcagtagggtggacgcgtcaggttattattattattattttttttgagacggagtctcgttctttcgcccaggccggagtgcagtggcgctatctcggctcactgcaagctctgcctcctgggttcacgccattctcctgcctcagcctcccgagtagctgggactagaggcacctgccactgcgcccagctaattttttgtatttttagtagagacggggtttcactgcgttagccaggatggtctcgatctcctgacctcgtgatccgcccacctcggcctcccaaagtgctgggattacaggcatgagccaccgcgcccggccagatgcgtcaggttataaatgacccttctcttttgttcatgtgtactctcgtggcaagactgctagtgagcagcaccctttctgcagaaagtaaactagccttgctgagagatcctttgtctcagtgttgatttttgcgacactgagcacccgttcccaacacacacaaagaaacatacttcatgcacttacttacacgtgctaagtacaaacatcaaattcagagtaacaaagtagaagggtggtttccagggctgagggtgtttcctatgcctgtcccaccattgtattttggaagcagataacttctctggcttcacagattcacagctgggcagaaactttgcctcaggatgaaccacaccttgtgtctcacccatatgtgattcagataatatttaggtgatatttgggccttagagttgatactgaaatggattaagacttttcagatgggccaggcaaggtagcttaggcctgtaaccccaacaattcaggaggccgagtctggcagattacttgagctcaggagttcaagaccagcctgggcacatagcaagaaccccgtctctacagaagatataaaaattagccatgcttagtggcacactcctgtagtcccagctacttgggcggctgaagtggcaggatcacttaaggccaaggatttgagaccagcctgggcaacatagtcagaccccatctctacaaaaaattaaattagccaggcatggtggcctgcatgtgtggtcccagctattgggaggctgaggcaggaggatcacttgagcccaggaggtcgagactgtgacaagtcatgattacgccactgcactccagcctgggtgacagagagagaccccatctcaaataaataaataaaagatttttgttctgatgggagtgaagggatcttgcatgtaagaaggacataaagtttaggagtccagaacacagtgtgttatgagcagaaaaatttccacacacaaaaaaaaccctatcttgaagtcctaatacccagtacctcagaatataactgtatttggatatatggcatctacaggagtgatcaagtaaaaataagcttgttaaagtgggttctgatccaatctggctgatttctttataagaagaggagattcagctgggcaaactggcttgcccctgtaatctccacattttaggaggccgaggtgggcagttccagcccagcctgggcaacatggtgagaccctgtttctactaaaaatacaaaaattacctggcaatggtgacccacacctgtactcccagctactgaggaggctgaggtgggagatttgcttgagcctgggaggcagaggttgcagtgagccaagatcacaccactgcactccagcctggaagtcagagtgagactcttgtctcaataaataaacaaatacataaatgaaagataacgccaaggaagcagggagctaacttgccttcttctgttaggtgtttgatgaaaaattgaagcagaaagtttatgagctatgtatgttatctgcgcagaagggctatatggcctaagccagaaagaaaaacagacctacagcttatctgcttcctgtattttgtttatatgtcctggaccatgaagaaaggcagttttttaaaattttgttttgttttgtttttttgaggcagagtctccctctgtcacccaggctggaatgcagtggcatgatctcagctcactgcaaccttcgcctcctgggttcaagcaattctcgagcctcaggctccagagtagcagggactacaagcacccacgaccacgcccaactaatttttttcttttttttgtattttcgtagagacagggtttcaccatgttgcccagggtggtctggagctcctgagctcaggcaatttgaccgccttggcatcccagagtgctaggattacaggcgtgagccaccgcacctggcctagaaaggcagatttatagcttatttgctttatctctttgctttcccctggtcctgccaggctgactccttttctctaattaggtctccacagactataccataaaagtgcatttttctcaccctcctataaaatccctggactcctagttttactacaaataaaccaggattctatttcccagtatgaaaagtttgtcagaaaaaaagaggtagcacgggaccttctttcttttcttcaaaactaattcacctcctcttcttctctttcctgtctctctcttcctagactggcctgcgcagttctagatccccagtgaatccttgggttgacatacaagggacgaagaacctataggaaagggaaatctctagctctcagaggtggctttttggatgtctggatgcattcataaccatcctcgtgttgccagaaaggggtcctgatccagatcctgaaaccgccattgcaaattataactgagaattattacagtgaaagggatccgacctaaccaactccatcttgcttttaacctccaagctgcctttgtccactcctgggtgtaggccaaactagctttgggaggaacttagtttatcttttaaaataagggcattaatagccctttcccaaaacaaatgccctttctgcttgggactagactgcctttataggattaacaagttagtcacaagattagaaactatagtttaggagtcatgcagctagaggctacaagattgtcacctttcccaaattgttcctgggaataacatcagtattttaaaacctaagatcagtgtttgagaaattttgcagtccctgcacttgatggatcacctgacacccagatcaataaactgactcatctggtcttgtgacaccacccaggaactgactcagtgcaaaaggacagtgtcaactctctgatttcatctctgaacaaccagtcatcactctggactcactggcccctacccatcaaattatccttaaaaaccctgatccccaagatttcagggagactcatttgagtaataataaaacttcagtctcctgtacagccagctccacatgaattaaactctttctctattacaatttccctgtcttgaggaattggctctgtctaggcagcagaaaaagagaacctattaggcagttaaacccagaagaaggggttcttggatcttgtgcaagaaagaattaggggggagtccagagagtaaagtgacagcaagttttttaagaaagtaaaggaataaggcagggtgcactggctcacacctgtaatcccagcactttgggaggctgaggtgtgaaaattgcttgaacccaggagtttgagacaagcctgggcaacatggcaaaaccccatctctacaaaaaaaaaaaaaaattagccaagggtggtggcatgcacctgtagtctctgctactcgggaggctgaggtgggaagattgctcaagcctgggaggtggaggttgcagtgacctgagatcacaccactgcactattgcttgggcaacacaaccactctctctcaaaaaaaaaaaaaaaaaaaaaacatatatattagatagatagattcagacagtttttatttcaacactgaatgtttacttttgaaactcctgacgtttaagttgataaaaactcaattttccccatgctaaaaactttatacatgtcctttcttcatgcatacatagaacccttcacacaatataattgttggaagtgtttctgaaatactgtttagacaaattacctatatttttacacctgtactataaaattaatatctaacagacaataaatattaaattatttaatagaagaattatttttcaaaggctaatgatttcacagctgtagcaaaacttttttctttttttttttgagatgaggtctcactctgttgcccaggctgcagtgcagcgatgtaatcacaccccacagcagcctccacctccccaggctcaggcaataccccaacctcagtttttgtatttttagtagagatggggtttcaccatgttgcccaaactagtctaaaactcctaggttcaagcgatctccccacccccacattctaaagtgctggcattgcaggcgtgaaccactgtgcctggccaaaatgtaattttaaaaataatttttaaaatcattatacaatttcctagaaacgatttaatccaatttaaagatttacatttctttccttgtacttcagtgaaaaacttataggattagtaaatcaaggtggtattttcagatttgtatggcaaaaaaatatgcggagacctgacagatgtaaaggatgtattctatcaatatatggagggtcccttacattttaagttcagtgaaagaactggaatgatacaagataatgaactaaaattgtataatgtaaaagcaagagctctgttgctaatgtacagctgtatcagttggatttttaaaaacccaacatactaatttggcagggtgcggtggctcatacctgtaatcccaacactttgcgaggccaaggtggatggatcacttgaagtcaggatttcgagaccagcctgatcaacatggtgaaaccccatctctacaaaaaaatacaaaaattagctggatttggtggcatgcacctgtagtcccagctacttgggaagctgaggtaggagaattacctgagcccaggaggtggaggttgcagtgtgctgagactgtgccactgcactccaacctgggtgacaaagcaagatcctgtctcaaaatattataacatgtgacagtgcagcttccagcagaaataatctgttcctcttttgctcacaccaaatattcacccccacttctaaaaaatataaaagaataagccaaaatgtaacttcaagtcacaagcaaggatctcatgacagtctcatgagacttcttttcattgagagcccagtagagttctcctcactcacaacacttcattgtggaacagaaaaatgaaacctgaataaaccctcccatccagaaaaggaaaataaagaaggtaccccgtagtttctgtttcacagcaaatgtgcaatgttgctgagaagatgagtcagggactgattccacaaggtcaagaatgaacaacagtccttttcatggctacagttctcctgagaatgtttccagtccattgtgatttgttgttcttgacttcacctgatgacatccctaatacagtatcagaaagtatgccttccttgtgcagtaagcacctttctccagctacttctatttatttatttatttatttatttatttatttatttatttatttatttttaagacaggctctgttgcccaggctggagtgcagtggcactatctcggctcactgcaaccttcacctcccagattcaagtgatcctcctgcctcagcctccagagtacccagctacttcattcccacaaaaatttaccatccaaaggattattataaatctatatttagttttgtttttagaaaatactatggactggtagaagtctcaaaatacaacacgactaaaaatacagaaattagccaggcatgacagtgtgcatctgtaatcccagctactctgaaggctgaggcaggagaatcacttgagcccaggagatggaggttgcagtgagctaagattcagctattgcactccagcctgagccacagagagagactctgtctcaaaaataaataaataaatatttttggtaggaaagcttaaagaaaaataattctatatgagaaagaatcttgtatcagaaattttgtcctggaataaaatgactgattgtataagaaagatgaatgttcaggaaaaacaagaaatcccacacatgtcatgaatggtctgtgtaagtcataataagattgatgaaaaaaagttttatgtgatcaaattcactataattaaagggaaattataatggtctttctagagattgggttttgattttaaaaaacaccacttatacactaaagaattggttcaaactacaaaattttgttaagcggtgctttaaataaattatgaaacataatttattcaatgtaaagttcaagttttatggaatctcactgttttcagctttctctcccctcttaaaaggcctgaaatcataactttttcacctaattttcagctcctgtagcctttttttctttgggttctaactgttgtggcctgacactataaaatgttttatttttgaggtctaaaggaaatgtttctttccaaacataatatctcccatagggaacagcagtcacactgtagaagggcttttcttttgcctttggaaaactggcctactaaacagatctcacactttatcaaagtaattcctgtgtcagtattactaagtttggtttggttacaaggaaatttaaattaaatttttttaaattaagtttattatgtccatataactttccgtatatgcttttaggtccctgttccattcagttaaagggctttgactcctgggtctaaaaaggacaccaagtcttgctaaatcttaaacactgacagcagttcaagcctcatcttcagacccagtagaagttcctaatcaaaataaactgtgtttgtgaaacacagggcaagaaattaaaactattcaactcctcaagtaccagtggttatactgaaagaagtggacatgtgagattgtcagggtcaatttttagagctgaaataagtttggtttctctagaaattaactatcaatttcaaaggcaaattgttgcaagaccagcatatgagcccctgcgtcagattaacaaggttgtcttggagcattagcccaccttttttttattctggagatggagtctcactctgttgccgaggctggagtgcaatagtgcgatctgggctcactgcaacctccacctcatgggttcaagtgattctcctgcctcagcctcccaagtagctggggtaacagacatgtgccatgatgcccagctaattttgtatttttagcagagatggggatttaccacgttggttaggctggtctcaaactcctgacctcaggtgattcacccacctcggcatcccaaagtgctgggattacaggcatgagccaccgtgcccagcctagcccactatttaataaagattatatagtgtataaaaaggctcatggaaattatacttacaggcaagatgattaaaattttatagtttgtttataaaatattgaaaaaccaatttaattggccttgtgccatttttactagggaatattgtttgggaaattaagtcttttctctcaaaaaataaaggttgccacctttttttgaaatctttgcgataccactttggttaaatgaatcacttattttataatggcctgtgatcctattttatgatatcaagtgttttaaactttttatatttgacaagctttccaaagtcacattttaacttgcgtcgtcattaaacttttgttaatcccct
